(19) United States
(12) Patent Application Publication
(10) Pub. No.: US 2020/0123574 A1
(43) Pub. Date: Apr. 23, 2020

(54) COMPOSITIONS AND METHODS OF TREATING AMYOTROPHIC LATERAL SCLEROSIS (ALS)

(71) Applicant: VOYAGER THERAPEUTICS, INC., Cambridge, MA (US)

(72) Inventors: Dinah Wen-Yee Sah, Cambridge, MA (US); Qingmin Chen, Belmont, MA (US); Jinzhao Hou, Cambridge, MA (US)

(21) Appl. No.: 16/611,054

(22) PCT Filed: May 4, 2018
(86) PCT No.: PCT/US2018/031089

§ 371 Date: Nov. 5, 2019

Related U.S. Application Data
(60) Provisional application No. 62/501,788, filed on May 5, 2017.
(60) Provisional application No. 62/507,927, filed on May 18, 2017.
(60) Provisional application No. 62/520,100, filed on Jun. 15, 2017.
(60) Provisional application No. 62/566,609, filed on Oct. 2, 2017.

(51) Int. Cl. C12N 15/861; C12N 15/113; C12N 9/02

(52) U.S. Cl. CPC C12N 15/861; C12N 15/113; C12N 9/0089; A61K 45/06; C12N 2310/14; C12N 2330/51; C12N 2750/14143; C12Y 115/01001

(57) ABSTRACT

The present invention relates to adeno-associated viral (AAV) particles encoding siRNA molecules and methods for treating amyotrophic lateral sclerosis (ALS).

### CROSS REFERENCE TO RELATED APPLICATIONS

[0001] This application claims the benefit of U.S. Provisional Patent Application No. 62/501,788, filed May 5, 2017, entitled Compositions and Methods of Treating Amyotrophic Lateral Sclerosis (ALS), U.S. Provisional Patent Application No. 62/507,927, filed May 18, 2017, entitled Compositions and Methods of Treating Amyotrophic Lateral Sclerosis (ALS), U.S. Provisional Patent Application No. 62/520,100, filed Jun. 15, 2017, entitled Compositions and Methods of Treating Amyotrophic Lateral Sclerosis (ALS), and U.S. Provisional Patent Application No. 62/566,609, filed Oct. 2, 2017, entitled Compositions and Methods of Treating Amyotrophic Lateral Sclerosis (ALS), the contents of each of which is incorporated herein by reference in its entirety.

### REFERENCE TO THE SEQUENCE LISTING

[0002] The present application is being filed along with a Sequence Listing in electronic format as an ASCII text file. The Sequence Listing is provided as an ASCII text file entitled 14482_0164_228_SEQ_LISTING.txt, created on Apr. 30, 2018, which is 6,635,467 bytes in size. The Sequence Listing is incorporated herein by reference in its entirety.

### FIELD OF THE INVENTION

[0003] The present invention relates to compositions, methods and processes for the design, preparation, manufacture, use and/or formulation of AAV particles comprising modulatory polynucleotides, e.g., polynucleotides encoding at least one small interfering RNA (siRNA) molecules which target the superoxide dismutase 1 (SOD1) gene. Targeting of the SOD1 gene may interfere with SOD1 gene expression and the resultant SOD1 protein production. The AAV particles comprising modulatory polynucleotides encoding at least one siRNA molecules may be inserted into recombinant adeno-associated virus (AAV) vectors. Methods for using the AAV particles to inhibit the expression of the SOD1 gene in a subject with a neurodegenerative disease (e.g., amyotrophic lateral sclerosis (ALS)) are also disclosed.

### BACKGROUND OF THE INVENTION

[0004] Amyotrophic lateral sclerosis (ALS), also known as Lou Gehrig's disease, is the most fatal progressive neurodegenerative disease, characterized by the predominant loss of motor neurons (MNs) in primary motor cortex, the brainstem, and the spinal cord. The loss of motor neurons devastates basic, fundamental movements, such as breathing, and typically causes death to patients within 2-5 years after diagnosis. Progressive deterioration of motor function in patients severely disrupts their breathing ability, requiring some form of breathing aid for survival of the patients. Other symptoms also include muscle weakness in hands, arms, legs or the muscles of swallowing. Some patients (e.g., FTD-ALS) may also develop frontotemporal dementia.

[0005] According to the ALS Association, approximately 5,600 people in the United States of America are diagnosed with ALS each year. The incidence of ALS is two per 100,000 people, and it is estimated that as many as 30.000 Americans may have the disease at any given time.

[0006] Two forms of ALS have been described: one is sporadic ALS (sALS), which is the most common form of ALS in the United States of America and accounts for 90 to 95% of all cases diagnosed; the other is familial ALS (fALS), which occurs in a family lineage mainly with a dominant inheritance and only accounts for about 5 to 10% of all cases in the United States of America. sALS and fALS are clinically indistinguishable.

[0007] Pathological studies found that disturbance of some cellular processes occur after disease onset, including increased ER stress, generation of free radicals (i.e., reactive oxygen species (ROS)), mitochondrial dysfunction, protein aggregation, apoptosis, inflammation and glutamate excitotoxicity, specifically in the motor neurons (MNs).

[0008] The causes of ALS are complicated and heterogeneous. In general, ALS is considered to be a complex genetic disorder in which multiple genes in combination with environmental exposures combine to render a person susceptible. More than a dozen genes associated with ALS have been discovered, including, SOD-1 (Cu²⁺/Zn²⁺ superoxide dismutase), TDP-43 (TARDBP, TAR DNA binding protein-43), FUS (Fused in Sarcoma/Translocated in Sarcoma), ANG (Angiogenin), ATXN2 (Ataxin-2), valosin containing protein (VCP), OPTN (Optineurin) and an expansion of the noncoding GGGGCC hexanucleotide repeat in the chromosome 9, open reading frame 72 (C9ORF72). However, the exact mechanisms of motor neuron degeneration are still elusive.

[0009] Currently, there is no curative treatment for ALS. The only FDA approved drug is Riluzole, which antagonizes the glutamate response to reduce the pathological development of ALS. However, only about a three-month life span expansion for ALS patients in the early stages has been reported, and no therapeutic benefit for ALS patients in the late stages has been observed, indicating a lack of therapeutic options for the patients (Bensimon G et al., J Neurol. 2002, 249, 609-615). Therefore, a new treatment strategy that can effectively prevent the disease progression is still in demand.

[0010] Many different strategies are under investigation for potential treatment of both sporadic and familial ALS. One strategy is based on the neuroprotective and/or regenerative effect of neurotrophic factors, such as Insulin-like growth factor I (IGF-I), Glial cell line-derived neurotrophic factor (GDNF). Vascular endothelial growth factor (VEGF), Colivelin and Activity dependent neurotrophic factor (ADNF) derived peptide, which can promote neuronal survival. Several studies demonstrated that neurotrophic factors can preserve motor neuron functionality, therefore improving motor performance in the SOD1 transgenic mice. However, such treatment often fails to prolong the survival of SOD1 mice, suggesting that neurotrophic factors are not sufficient to prolong neuronal survival (See a review by Yacila and Sari, Curr Med Chem., 2014, 21(31), 3583-3593).

[0011] Another strategy for ALS treatment has focused on stem cell based therapy. Stem cells have the potential to generate motor neurons, thereby replacing degenerating motor neurons in the ALS-affected CNS such as primary motor cortex, brainstem and spinal cord. Stem cells derived from multiple sources have been investigated, including induced pluripotent stem cells (iPSCs), mesenchymal stromal cells (MSCs) (e.g. bone marrow mesenchymal stromal cells (BMSCs) and adipocyte stem cells (ASCs)) and neural tissue origin neural stem cells (e.g., fetal spinal neural stem cells (NSCs), multipotent neural progenitor cells (NPCs)) (e.g., reviewed by Kim C et al., Exp. Neurobiol., 2014, 23(3), 207-214).

[0012] Mutations in the gene of superoxide dismutase type I (SOD1, Cu²⁺/Zn²⁺ superoxide dismutase type I) are the most common cause of fALS, accounting for about 20 to 30% of all fALS cases. Recent reports indicate that SOD1 mutations may also be linked to about 4% of all sALS cases (Robberecht and Philip, Nat. Rev. Neurosci., 2013, 14, 248-264). SOD1-linked fALS is most likely not caused by loss of the normal SOD1 activity, but rather by a gain of a toxic function. One of the hypotheses for mutant SOD1-linked fALS toxicity proposes that an aberrant SOD1 enzyme causes small molecules such as peroxynitrite or hydrogen peroxide to produce damaging free radicals. Other hypotheses for mutant SOD1 neurotoxicity include inhibition of the proteasome activity, mitochondrial damage, disruption of RNA processing and formation of intracellular aggregates. Abnormal accumulation of mutant SOD1 variants and/or wild-type SOD1 in ALS forms insoluble fibrillar aggregates which are identified as pathological inclusions. Aggregated SOD1 protein can induce mitochondria stress (Vehvilainen P et al., Front Cell Neurosci., 2014, 8, 126) and other toxicity to cells, particularly to motor neurons.

[0013] These findings indicate that SOD1 can be a potential therapeutic target for both familial and sporadic ALS. A therapy that can reduce the SOD1 protein produced in the central nervous system of ALS patients may ameliorate the symptoms of ALS in patients such as motor neuron degeneration and muscle weakness and atrophy. Agents and methods that aim to prevent the formation of wild type and/or mutant SOD1 protein aggregation may prevent disease progression and allow for amelioration of ALS symptoms. RNA interfering (RNAi) mediated gene silencing has drawn researchers' interest in recent years. Small double stranded RNA (small interfering RNA) molecules that target the SOD1 gene haven been taught in the art for their potential in treating ALS (See, e.g., U.S. Pat. No. 7,632,938 and U.S. Patent Publication No. 20060229268, the contents of which is herein incorporated by reference in its entirety).

[0014] The present invention develops an RNA interference based approach to inhibit or prevent the expression of SOD1 in ALS patients for treatment of the disease.

[0015] The present invention provides novel double stranded RNA (dsRNA) constructs and siRNA constructs and methods of their design. In addition, these novel siRNA constructs may be synthetic molecules or be encoded in an expression vector (one or both strands) for delivery into cells. Such vectors include, but are not limited to adeno-associated viral vectors such as vector genomes of any of the AAV serotypes or other viral delivery vehicles such as lentivirus, etc.

### SUMMARY OF THE INVENTION

[0016] Described herein are methods, processes, compositions kits and devices for the administration of AAV particles comprising modulatory polynucleotides encoding at least one siRNA molecules for the treatment, prophylaxis, palliation and/or amelioration of a disease and/or disorder (e.g., amyotrophic lateral sclerosis (ALS)).

[0017] The present invention relates to RNA molecule mediated gene specific interference with gene expression and protein production. Methods for treating motor neuron degeneration diseases such as amyotrophic lateral sclerosis are also included in the present invention. The siRNA included in the compositions featured herein encompass a dsRNA having an antisense strand (the antisense strand) having a region that is 30 nucleotides or less, generally 19-24 nucleotides in length, that is substantially complementary to at least part of an mRNA transcript of the SOD1 gene.

[0018] The present invention provides short double stranded RNA molecules such as small interfering RNA (siRNA) duplexes that target SOD1 mRNA to interfere with SOD1 gene expression and/or SOD1 protein production. The siRNA duplexes of the present invention may interfere with both alleles of the SOD1 gene irrespective of any particular mutation in the SOD1 gene, and may particularly interact with those found in ALS disease.

[0019] In some embodiments, such siRNA molecules, or a single strand of the siRNA molecules, are inserted into adeno-associated viral (AAV) vectors to be introduced into cells, specifically motor neurons and/or other surrounding cells in the central nervous system. The AAV vector may comprise sequences encoding 1, 2, 3, 4, or more than 4 siRNA duplexes.

[0020] The siRNA duplex of the present invention comprises an antisense strand and a sense strand hybridized together forming a duplex structure, wherein the antisense strand is complementary to the nucleic acid sequence of the targeted SOD1 gene, and wherein the sense strand is homologous to the nucleic acid sequence of the targeted SOD1 gene. In some aspects, the 5′end of the antisense strand has a 5′ phosphate group and the 3′end of the sense strand contains a 3′hydroxyl group. In other aspects, there are none, one or 2 nucleotides overhangs at the 3′end of each strand.

[0021] According to the present invention, each strand of the siRNA duplex targeting the SOD1 gene is about 19-25 nucleotides in length, preferably about 19 nucleotides, 20 nucleotides, 21 nucleotides, 22 nucleotides, 23 nucleotides, 24 nucleotides, or 25 nucleotides in length. In some aspects, the siRNAs may be unmodified RNA molecules.

[0022] In other aspects, the siRNAs may contain at least one modified nucleotide, such as base, sugar or backbone modification.

[0023] In one embodiment, an siRNA or dsRNA includes at least two sequences that are complementary to each other. The dsRNA includes a sense strand having a first sequence and an antisense strand having a second sequence. The antisense strand includes a nucleotide sequence that is substantially complementary to at least part of an mRNA encoding SOD1, and the region of complementarity is 30 nucleotides or less, and at least 15 nucleotides in length. Generally, the dsRNA is 19 to 24, e.g., 19 to 21 nucleotides in length. In some embodiments the dsRNA is from about 15 to about 25 nucleotides in length, and in other embodiments the dsRNA is from about 25 to about 30 nucleotides in length.

[0024] The dsRNA, either upon contacting with a cell expressing SOD1 or upon transcription within a cell expressing SOD1, inhibits or suppresses the expression of a SOD1 gene by at least 10%, at least 20%, at least 25%, at least 30%, at least 35% or at least 40% or more, such as when assayed by a method as described herein.

[0025] According to the present invention, AAV vectors comprising the nucleic acids encoding the siRNA duplexes, one strand of the siRNA duplex or the dsRNA targeting SOD1 gene are produced, the AAV vector serotype may be AAV1, AAV2, AAV3, AAV4, AAV5, AAV6, AAV7, AAV8, AAV9, AAV9.47, AAV9(hu14), AAV10, AAV11, AAV12, AAVrh8, AAVrh10, AAV-DJ8 and/or AAV-DJ, and variants thereof.

[0026] The present invention also provides pharmaceutical compositions comprising at least one siRNA duplex targeting the SOD1 gene and a pharmaceutically acceptable carrier. In some aspects, a nucleic acid sequence encoding the siRNA duplex is inserted into an AAV vector.

[0027] In some embodiments, the present invention provides methods for inhibiting/silencing SOD1 gene expression in a cell. Accordingly, the siRNA duplexes or dsRNA can be used to substantially inhibit SOD1 gene expression in a cell, in particular in a motor neuron. In some aspects, the inhibition of SOD1 gene expression refers to an inhibition by at least about 20%, preferably by at least about 30%, 40%, 50%, 60%, 70%, 80%, 85%, 90%, 95% and 100%. Accordingly, the protein product of the targeted gene may be inhibited by at least about 20%, preferably by at least about 30%, 40%, 50%, 60%, 70%, 80%, 85%, 90%, 95% and 100%. The SOD1 gene can be either a wild type gene or a mutated SOD1 gene with at least one mutation. Accordingly, the SOD1 protein is either wild type protein or a mutated polypeptide with at least one mutation.

[0028] In some embodiments, the present invention provides methods for treating, or ameliorating amyotrophic lateral sclerosis associated with abnormal SOD1 gene and/or SOD1 protein in a subject in need of treatment, the method comprising administering to the subject a pharmaceutically effective amount of at least one siRNA duplex targeting the SOD1 gene, delivering said siRNA duplex into targeted cells, inhibiting SOD1 gene expression and protein production, and ameliorating symptoms of ALS in the subject.

[0029] In some embodiments, an AAV vector comprising the nucleic acid sequence encoding at least one siRNA duplex targeting the SOD1 gene is administered to the subject in need for treating and/or ameliorating ALS. The AAV vector serotype may be selected from the group consisting of AAV1, AAV2, AAV3, AAV4, AAV5, AAV6, AAV7, AAV8, AAV9, AAV9.47, AAV9(hu14), AAV10, AAV11, AAV12, AAVrh8, AAVrh10 and AAV-DJ, and variants thereof.

[0030] In some aspects, ALS is familial ALS linked to SOD1 mutations. In other aspects, ALS is sporadic ALS which is characterized by abnormal aggregation of SOD1 protein or disruption of SOD1 protein function or localization, though not necessarily as a result of genetic mutation. The symptoms of ALS ameliorated by the present method may include motor neuron degeneration, muscle weakness, stiffness of muscles, slurred speech and/or difficulty in breathing.

[0031] In some embodiments, the siRNA duplexes or dsRNA targeting SOD1 gene or the AAV vectors comprising such siRNA-encoding molecules may be introduced directly into the central nervous system of the subject, for example, by intracranial injection.

[0032] In some embodiments, the pharmaceutical composition of the present invention is used as a solo therapy. In other embodiments, the pharmaceutical composition of the present invention is used in combination therapy. The combination therapy may be in combination with one or more neuroprotective agents such as small molecule compounds, growth factors and hormones which have been tested for their neuroprotective effect on motor neuron degeneration.

[0033] In some embodiments, the present invention provides methods for treating, or ameliorating amyotrophic lateral sclerosis by administering to a subject in need thereof a therapeutically effective amount of a plasmid or AAV vector described herein. The ALS may be familial ALS or sporadic ALS.

[0034] The details of various embodiments of the invention are set forth in the description below. Other features, objects, and advantages of the invention will be apparent from the description and the drawings, and from the claims.

### BRIEF DESCRIPTION OF THE DRAWINGS

[0035] The foregoing and other objects, features and advantages will be apparent from the following description of particular embodiments of the invention, as illustrated in the accompanying drawings. The drawings are not necessarily to scale, emphasis instead being placed upon illustrating the principles of various embodiments of the invention.

[0036] FIG. 1 is a schematic of a viral genome of the invention.

[0037] FIG. 2 is a schematic of a viral genome of the invention.

[0038] FIG. 3 is a schematic of a viral genome of the invention.

[0039] FIG. 4 is a schematic of a viral genome of the invention.

[0040] FIG. 5 is a schematic of a viral genome of the invention.

[0041] FIG. 6 is a schematic of a viral genome of the invention.

[0042] FIG. 7 is a schematic of a viral genome of the invention.

[0043] FIG. 8 is a schematic of a viral genome of the invention.

[0044] FIG. 9 is a schematic of a viral genome of the invention.

[0045] The details of one or more embodiments of the invention are set forth in the accompanying description below. Although any materials and methods similar or equivalent to those described herein can be used in the practice or testing of the present invention, the preferred materials and methods are now described. Other features, objects and advantages of the invention will be apparent from the description. In the description, the singular forms also include the plural unless the context clearly dictates otherwise. Unless defined otherwise, all technical and scientific terms used herein have the same meaning as commonly understood by one of ordinary skill in the art to which this invention belongs. In the case of conflict, the present description will control.

### DETAILED DESCRIPTION OF THE INVENTION

### I. Compositions of the Invention

[0046] According to the present invention, compositions for delivering modulatory polynucleotides and/or modulatory polynucleotide-based compositions by adeno-associated viruses (AAVs) are provided. AAV particles of the invention may be provided via any of several routes of administration, to a cell, tissue, organ, or organism, in vivo, ex vivo or in vitro.

[0047] As used herein, an “AAV particle” is a virus which comprises a viral genome with at least one payload region and at least one inverted terminal repeat (ITR) region.

[0048] As used herein, “viral genome” or “vector genome” or “viral vector” refers to the nucleic acid sequence(s) encapsulated in an AAV particle. Viral genomes comprise at least one payload region encoding polypeptides or fragments thereof.

[0049] As used herein, a “payload” or “payload region” is any nucleic acid molecule which encodes one or more polypeptides of the invention. At a minimum, a payload region comprises nucleic acid sequences that encode a sense and antisense sequence, an siRNA-based composition, or a fragment thereof, but may also optionally comprise one or more functional or regulatory elements to facilitate transcriptional expression and/or polypeptide translation.

[0050] The nucleic acid sequences and polypeptides disclosed herein may be engineered to contain modular elements and/or sequence motifs assembled to enable expression of the modulatory polynucleotides and/or modulatory polynucleotide-based compositions of the invention. In some embodiments, the nucleic acid sequence comprising the payload region may comprise one or more of a promoter region, an intron, a Kozak sequence, an enhancer or a polyadenylation sequence. Payload regions of the invention typically encode at least one sense and antisense sequence, an siRNA-based compositions, or fragments of the foregoing in combination with each other or in combination with other polypeptide moieties.

[0051] The payload regions of the invention may be delivered to one or more target cells, tissues, organs or organisms within the viral genome of an AAV particle.

### Adeno-Associated Viruses (AAVs) and AAV Particles

[0052] Viruses of the Parvoviridae family are small non-enveloped icosahedral capsid viruses characterized by a single stranded DNA genome. Parvoviridae family viruses consist of two subfamilies: Parvovirinae, which infect vertebrates, and Densovirinae, which infect invertebrates. Due to its relatively simple structure, and due to the fact that it is easily manipulated using standard molecular biology techniques, this virus family is useful as a biological tool. The genome of the virus may be modified to contain a minimum of components for the assembly of a functional recombinant virus, or viral particle, which is loaded with or engineered to express or deliver a desired payload, which may be delivered to a target cell, tissue, organ, or organism.

[0053] The parvoviruses and other members of the Parvoviridae family are generally described in Kenneth I. Berns, “Parvoviridae: The Viruses and Their Replication,” Chapter 69 in FIELDS VIROLOGY (3d Ed. 1996), the contents of which are incorporated by reference in their entirety.

[0054] The Parvoviridae family comprises the Dependovirus genus which includes adeno-associated viruses (AAV) capable of replication in vertebrate hosts including, but not limited to, human, primate, bovine, canine, equine, and ovine species.

[0055] The AAV viral genome is a linear, single-stranded DNA (ssDNA) molecule approximately 5,000 nucleotides (nt) in length. The AAV viral genome can comprise a payload region and at least one inverted terminal repeat (ITR) or ITR region. ITRs traditionally flank the coding nucleotide sequences for the non-structural proteins (encoded by Rep genes) and the structural proteins (encoded by capsid genes or Cap genes). While not wishing to be bound by theory, an AAV viral genome typically comprises two ITR sequences. The AAV viral genome comprises a characteristic T-shaped hairpin structure defined by the self-complementary terminal 145 nt of the 5′ and 3′ ends of the ssDNA which form an energetically stable double stranded region. The double stranded hairpin structures comprise multiple functions including, but not limited to, acting as an origin for DNA replication by functioning as primers for the endogenous DNA polymerase complex of the host viral replication cell.

[0056] In addition to the encoded heterologous payload. AAV vectors may comprise the viral genome, in whole or in part, of any naturally occurring and/or recombinant AAV serotype nucleotide sequence or variant. AAV variants may have sequences of significant homology at the nucleic acid (genome or capsid) and amino acid levels (capsids), to produce constructs which are generally physical and functional equivalents, replicate by similar mechanisms, and assemble by similar mechanisms. Chiorini et al., J. Vir. 71: 6823-33(1997), Srivastava et al., J. Vir. 45:555-64 (1983); Chiorini et al., J. Vir. 73:1309-1319 (1999); Rutledge et al., J. Vir. 72:309-319 (1998); and Wu et al., J. Vir. 74: 8635-47 (2000), the contents of each of which are incorporated herein by reference in their entirety.

[0057] In one embodiment, AAV particles of the present invention are recombinant AAV vectors which are replication defective, lacking sequences encoding functional Rep and Cap proteins within their viral genome. These defective AAV vectors may lack most or all parental coding sequences and essentially carry only one or two AAV ITR sequences and the nucleic acid of interest for delivery to a cell, a tissue, an organ or an organism.

[0058] In one embodiment, the viral genome of the AAV particles of the present invention comprise at least one control element which provides for the replication, transcription and translation of a coding sequence encoded therein. Not all of the control elements need always be present as long as the coding sequence is capable of being replicated, transcribed and/or translated in an appropriate host cell. Non-limiting examples of expression control elements include sequences for transcription initiation and/or termination, promoter and/or enhancer sequences, efficient RNA processing signals such as splicing and polyadenylation signals, sequences that stabilize cytoplasmic mRNA, sequences that enhance translation efficacy (e.g., Kozak consensus sequence), sequences that enhance protein stability, and/or sequences that enhance protein processing and/or secretion.

[0059] According to the present invention, AAV particles for use in therapeutics and/or diagnostics comprise a virus that has been distilled or reduced to the minimum components necessary for transduction of a nucleic acid payload or cargo of interest. In this manner. AAV particles are engineered as vehicles for specific delivery while lacking the deleterious replication and/or integration features found in wild-type viruses.

[0060] AAV vectors of the present invention may be produced recombinantly and may be based on adeno-associated virus (AAV) parent or reference sequences. As used herein, a “vector” is any molecule or moiety which transports, transduces or otherwise acts as a carrier of a heterologous molecule such as the nucleic acids described herein.

[0061] In addition to single stranded AAV viral genomes (e.g., ssAAVs), the present invention also provides for self-complementary AAV (scAAVs) viral genomes. scAAV viral genomes contain DNA strands which anneal together to form double stranded DNA. By skipping second strand synthesis, scAAVs allow for rapid expression in the cell.

[0062] In one embodiment, the AAV particle of the present invention is an scAAV.

[0063] In one embodiment, the AAV particle of the present invention is an ssAAV.

[0064] Methods for producing and/or modifying AAV particles are disclosed in the art such as pseudotyped AAV vectors (PCT Patent Publication Nos. WO200028004; WO200123001; WO2004112727; WO 2005005610 and WO 2005072364, the content of each of which is incorporated herein by reference in its entirety).

[0065] AAV particles may be modified to enhance the efficiency of delivery. Such modified AAV particles can be packaged efficiently and be used to successfully infect the target cells at high frequency and with minimal toxicity. In some embodiments the capsids of the AAV particles are engineered according to the methods described in US Publication Number US 20130195801, the contents of which are incorporated herein by reference in their entirety.

[0066] In one embodiment, the AAV particles comprising a payload region encoding the polypeptides of the invention may be introduced into mammalian cells.

### AAV Serotypes

[0067] AAV particles of the present invention may comprise or be derived from any natural or recombinant AAV serotype. According to the present invention, the AAV particles may utilize or be based on a serotype selected from any of the following AAV1, AAV2, AAV2G9, AAV3, AAV3a, AAV3b, AAV3-3, AAV4, AAV4-4, AAV5, AAV6, AAV6.1, AAV6.2, AAV6.1.2, AAV7, AAV7.2, AAV8, AAV9, AAV9.11, AAV9.13, AAV9.16, AAV9.24, AAV9.45, AAV9.47, AAV9.61, AAV9.68, AAV9.84, AAV9.9, AAV100, AAV11, AAV12, AAV16.3, AAV24.1, AAV27.3, AAV42.12, AAV42-1b, AAV42-2, AAV42-3a, AAV42-3b, AAV42-4, AAV42-5a, AAV42-5b, AAV42-6b, AAV42-8, AAV42-10, AAV42-11, AAV42-12, AAV42-13, AAV42-15, AAV42-aa, AAV43-1, AAV43-12, AAV43-20, AAV43-21, AAV43-23, AAV43-25, AAV43-5, AAV44.1, AAV44.2, AAV44.5, AAV223.1, AAV223.2, AAV223.4, AAV223.5, AAV223.6, AAV223.7, AAV1-7/rh.48, AAV1-8/rh.49, AAV2-15/rh.62, AAV2-3/rh.61, AAV2-4/rh.50, AAV2-5/rh.51, AAV3.1/hu.6, AAV3.1/hu.9, AAV3-9/rh.52, AAV3-11/rh.53, AAV4-8/r11.64, AAV4-9/rh.54, AAV4-19/rh.55, AAV5-3/rh.57, AAV5-22/rh.58, AAV7.3/hu.7, AAV16.8/hu.10, AAV16.12/hu.11, AAV29.3/bb.1, AAV29.5/bb.2, AAV106, 1/hu.37, AAV114.3/hu.40, AAV127.2/hu.41, AAV127.5/hu.42, AAV128.3/hu.44, AAV130.4/hu.48, AAV45.1/hu.53, AAV145.5/hu.54, AAV145.6/hu.55, AAV161.10/hu.60, AAV161.6/hu.61, AAV33.12/hu.17, AAV33.4/hu.15, AAV33.8/hu.16, AAV52/hu.19, AAV52.1/hu.20, AAV58.2/hu.25, AAVA3.3, AAVA3.4, AAVA3.5, AAVA3.7, AAVC1, AAVC2, AAVC5, AAV-DJ, AAV-DJ8, AAVF3, AAVF5, AAVH2, AAVrh.72, AAVhu.8, AAVrh.68, AAVrh.70, AAVpi.1, AAVpi.3, AAVpi.2, AAVrh.60, AAVrh.44, AAVrh.65, AAVrh.55, AAVrh.47, AAVrh.69, AAVrh.45, AAVrh.59, AAVhu.12, AAVH6, AAVLK03, AAVH-1/hu.1, AAVH-5/hu.3, AAVLG-10/rh.40, AAVLG-4/rh.38, AAVLG-9/hu.39, AAVN721-8/rh.43, AAVCh.5, AAVCh.5R1, AAVcy.2, AAVcy.3, AAVcy.4, AAVcy.5, AAVCy.5R1, AAVCy.5R2, AAVCy.5R3, AAVCy.5R4, AAVcy.6, AAVhu.1, AAVhu.2, AAVhu.3, AAVhu.4, AAVhu.5, AAVhu.6, AAVhu.7, AAVhu.9, AAVhu.10, AAVhu.11, AAVhu.13, AAVhu.15, AAVhu.16, AAVhu.17, AAVhu.18, AAVhu.20, AAVhu.21, AAVhu.22, AAVhu.23.2, AAVhu.24, AAVhu.25, AAVhu.27, AAVhu.28, AAVhu.29, AAVhu.29R, AAVhu.31, AAVhu.32, AAVhu.34, AAVhu.35, AAVhu.37, AAVhu.39, AAVhu.40, AAVhu.41, AAVhu.42, AAVhu.43, AAVhu.44, AAVhu.44R1, AAVhu.44R2, AAVhu.44R3, AAVhu.45, AAVhu.46, AAVhu.47, AAVhu.48, AAVhu.48R1, AAVhu.48R2, AAVhu.48R3, AAVhu.49, AAVhu.51, AAVhu.52, AAVhu.54, AAVhu.55, AAVhu.56, AAVhu.57, AAVhu.58, AAVhu.60, AAVhu.61, AAVhu.63, AAVhu.64, AAVhu.66, AAVhu.67, AAVhu.14/9, AAVhu.t 19, AAVrh.2, AAVrh.2R, AAVrh.8, AAVrh.8R, AAVrh.10, AAVrh.12, AAVrh.13, AAVrh.13R, AAVrh.14, AAVrh.17, AAVrh.18, AAVrh.19, AAVrh.20, AAVrh.21, AAVrh.22, AAVrh.23, AAVrh.24, AAVrh.25, AAVrh.31, AAVrh.32, AAVrh.33, AAVrh.34, AAVrh.35, AAVrh.36, AAVrh.37, AAVrh.37R2, AAVrh.38, AAVrh.39, AAVrh.40, AAVrh.46, AAVrh.48, AAVrh.48.1, AAVrh.48.1.2, AAVrh.48.2, AAVrh.49, AAVrh.51, AAVrh.52, AAVrh.53, AAVrh.54, AAVrh.56, AAVrh.57, AAVrh.58, AAVrh.61, AAVrh.64, AAVrh.64R1, AAVrh.64R2, AAVrh.67, AAVrh.73, AAVrh.74, AAVrh8R, AAVrh8R A586R mutant, AAVrh8R R533A mutant, AAAV, BAAV, caprine AAV, bovine AAV, AAVhE1.1, AAVhEr1.5, AAVhER1.14, AAVhEr1.8, AAVhEr1.16, AAVhEr1.18, AAVhEr1.35, AAVhEr1.7, AAVhEr1.36, AAVhEr2.29, AAVhEr2.4, AAVhEr2.16, AAVhEr2.30, AAVhEr2.31, AAVhEr2.36, AAVhER1.23, AAVhEr3.1, AAV2.5T, AAV-PAEC, AAV-LK01, AAV-LK02, AAV-LK03, AAV-LK04, AAV-LK05, AAV-LK06, AAV-LK07, AAV-LK08, AAV-LK09, AAV-LK10, AAV-LK11, AAV-LK12, AAV-LK13, AAV-LK14, AAV-LK15, AAV-LK16, AAV-LK17, AAV-LK18, AAV-LK19, AAV-PAEC2, AAV-PAEC4, AAV-PAEC6, AAV-PAEC7, AAV-PAEC8, AAV-PAEC11, AAV-PAEC12, AAV-2-pre-miRNA-101, AAV-8h, AAV-8b, AAV-h, AAV-b, AAV SM 10-2, AAV Shuffle 100-1, AAV Shuffle 100-3, AAV Shuffle 100-7, AAV Shuffle 10-2, AAV Shuffle 10-6, AAV Shuffle 10-8, AAV Shuffle 100-2, AAV SM 10-1, AAV SM 10-8, AAV SM 100-3, AAV SM 100-10, BNP61 AAV, BNP62 AAV, BNP63 AAV, AAVrh.50, AAVrh.43, AAVrh.62, AAVrh.48, AAVhu.19, AAVhu.11, AAVhu.53, AAV4-8/rh.64, AAVLG-9/hu.39, AAV54.5/hu.23, AAV54.2/hu.22, AAV54, 7/hu.24, AAV54, 1/hu.21, AAV54.4R/hu.27, AAV46.2/hu.28, AAV46.6/hu.29, AAV128, 1/hu.43, true type AAV (ttAAV), UPENN AAV10, Japanese AAV10 serotypes, AAV CBr-7.1, AAV CBr-7.10, AAV CBr-7.2, AAV CBr-7.3, AAV CBr-7.4, AAV CBr-7.5, AAV CBr-7.7, AAV CBr-7.8, AAV CBr-B7.3, AAV CBr-B7.4, AAV CBr-E1, AAV CBr-E2, AAV CBr-E3, AAV CBr-E4, AAV CBr-E5, AAV CBr-e5, AAV CBr-E6, AAV CBr-E7, AAV CBr-E8, AAV CHt-1, AAV CHt-2, AAV CHt-3, AAV CHt-6.1, AAV CHt-6.10, AAV CHt-6.5, AAV CHt-6.6, AAV CHt-6.7, AAV CHt-6.8, AAV CHt-P1, AAV CHt-P2, AAV CHt-P5, AAV CHt-P6, AAV CHt-P8, AAV CHt-P9, AAV CKd-1, AAV CKd-10, AAV CKd-2, AAV CKd-3, AAV CKd-4, AAV CKd-6, AAV CKd-7, AAV CKd-8, AAV CKd-B1, AAV CKd-B2, AAV CKd-B3, AAV CKd-B4, AAV CKd-B5, AAV CKd-B6, AAV CKd-B7, AAV CKd-B8, AAV CKd-H1, AAV CKd-H2, AAV CKd-H3, AAV CKd-H4, AAV CKd-H5, AAV CKd-H6, AAV CKd-N3, AAV CKd-N4, AAV CKd-N9, AAV CLg-F1, AAV CLg-F2, AAV CLg-F3, AAV CLg-F4, AAV CLg-F5, AAV CLg-F6, AAV CLg-F7, AAV CLg-F8, AAV CLv-1, AAV CLv1-1, AAV Clv1-10, AAV CLv1-2, AAV CLv-12, AAV CLv1-3, AAV CLv-13, AAV CLv1-4, AAV Clv1-7, AAV Clv1-8, AAV Clv1-9, AAV CLv-2, AAV CLv-3, AAV CLv-4, AAV CLv-6, AAV CLv-8, AAV CLv-D1, AAV CLv-D2, AAV CLv-D3, AAV CLv-D4, AAV CLv-D5, AAV CLv-D6, AAV CLv-D7, AAV CLv-D8, AAV CLv-E1, AAV CLv-K1, AAV CLv-K3, AAV CLv-K6, AAV CLv-L4, AAV CLv-L5, AAV CLv-L6, AAV CLv-M1, AAV CLv-M11, AAV CLv-M2, AAV CLv-M5, AAV CLv-M6, AAV CLv-M7, AAV CLv-M8, AAV CLv-M9, AAV CLv-R1, AAV CLv-R2, AAV CLv-R3, AAV CLv-R4, AAV CLv-R5, AAV CLv-R6, AAV CLv-R7, AAV CLv-R8, AAV CLv-R9, AAV CSp-1, AAV CSp-10, AAV CSp-11, AAV CSp-2, AAV CSp-3, AAV CSp-4, AAV CSp-6, AAV CSp-7, AAV CSp-8, AAV CSp-8.10, AAV CSp-8.2, AAV CSp-8.4, AAV CSp-8.5, AAV CSp-8.6, AAV CSp-8.7, AAV CSp-8.8, AAV CSp-8.9, AAV CSp-9, AAV.hu.48R3, AAV.VR-355, AAV3B, AAV4, AAV5, AAVF1/HSC1, AAVF11/HSC11, AAVF12/HSC12, AAVF13/HSC13, AAVF14/HSC14, AAVF15/HSC15, AAVF16/HSC16, AAVF17/HSC17, AAVF2/HSC2, AAVF3/HSC3, AAVF4/HSC4, AAVF5/HSC5, AAVF6/HSC6, AAVF7/HSC7, AAVF8/HSC8, AAVF9/HSC9, AAV-PHP.B (PHP.B), AAV-PHP.A (PHP.A), G2B-26, G2B-13, TH1.1-32, TH1.1-35, AAVPHP.B2, AAVPHP.B3, AAVPHP.N/PHP.B-DGT, AAVPHP.B-EST, AAVPHP.B-GGT, AAVPHP.B-ATP, AAVPHP.B-ATT-T, AAVPHP.B-DGT-T, AAVPHP.B-GGT-T, AAVPHP.B-SGS, AAVPHP.B-AQP, AAVPHP.B-QQP, AAVPHP.B-SNP(3), AAVPHP.B-SNP, AAVPHP.B-QGT, AAVPHP.B-NQT, AAVPHP.B-EGS, AAVPHP.B-SGN, AAVPHP.B-EGT, AAVPHP.B-DST, AAVPHP.B-DST, AAVPHP.B-STP, AAVPHP.B-PQP, AAVPHP.B-SQP, AAVPHP.B-QLP, AAVPHP.B-TMP, AAVPHP.B-TTP, AAVPHP.S/G2A12, AAVG2A15/G2A3, AAVG2B4, AAVG2B5 and variants thereof.

[0068] In some embodiments, the AAV serotype may be, or have, a sequence as described in United States Publication No. US20030138772, the contents of which are herein incorporated by reference in their entirety, such as, but not limited to, AAV1 (SEQ ID NO: 6 and 64 of US20030138772), AAV2 (SEQ ID NO: 7 and 70 of US20030138772), AAV3 (SEQ ID NO: 8 and 71 of US20030138772), AAV4 (SEQ ID NO: 63 of US20030138772). AAV5 (SEQ ID NO: 114 of US20030138772), AAV6 (SEQ ID NO: 65 of US20030138772), AAV7 (SEQ ID NO: 1-3 of US20030138772), AAV8 (SEQ ID NO: 4 and 95 of US20030138772), AAV9 (SEQ ID NO: 5 and 100 of US20030138772), AAV10 (SEQ ID NO: 117 of US20030138772), AAV11 (SEQ ID NO: 118 of US20030138772), AAV12 (SEQ ID NO: 119 of US20030138772). AAVrh10 (amino acids 1 to 738 of SEQ ID NO: 81 of US20030138772), AAV16.3 (US20030138772 SEQ ID NO: 10), AAV29.3/bb.1 (US20030138772 SEQ ID NO: 11), AAV29.4 (US20030138772 SEQ ID NO: 12), AAV29.5/bb.2 (US20030138772 SEQ ID NO: 13), AAV1.3 (US20030138772 SEQ ID NO: 14), AAV13.3 (US20030138772 SEQ ID NO: 15), AAV24.1 (US20030138772 SEQ ID NO: 16), AAV27.3 (US20030138772 SEQ ID NO: 17), AAV7.2 (US20030138772 SEQ ID NO: 18), AAVC1 (US20030138772 SEQ ID NO: 19), AAVC3 (US20030138772 SEQ ID NO: 20), AAVC5 (US20030138772 SEQ ID NO: 21), AAVF1 (US20030138772 SEQ ID NO: 22), AAVF3 (US20030138772 SEQ ID NO: 23). AAVF5 (US20030138772 SEQ ID NO: 24), AAVH6 (US20030138772 SEQ ID NO: 25), AAVH2 (US20030138772 SEQ ID NO: 26), AAV42-8 (US20030138772 SEQ ID NO: 27). AAV42-15 (US20030138772 SEQ ID NO: 28), AAV42-5b (US20030138772 SEQ ID NO: 29), AAV42-1b (US20030138772 SEQ ID NO: 30), AAV42-13 (US20030138772 SEQ ID NO: 31), AAV42-3a (US20030138772 SEQ ID NO: 32), AAV42-4 (US20030138772 SEQ ID NO: 33), AAV42-5a (US20030138772 SEQ ID NO: 34), AAV42-10 (US20030138772 SEQ ID NO: 35), AAV42-3b (US20030138772 SEQ ID NO: 36), AAV42-11 (US20030138772 SEQ ID NO: 37), AAV42-6b (US20030138772 SEQ ID NO: 38), AAV43-1 (US20030138772 SEQ ID NO: 39). AAV43-5 (US20030138772 SEQ ID NO: 40), AAV43-12 (US20030138772 SEQ ID NO: 41), AAV43-20 (US20030138772 SEQ ID NO: 42), AAV43-21 (US20030138772 SEQ ID NO: 43), AAV43-23 (US20030138772 SEQ ID NO: 44), AAV43-25 (US20030138772 SEQ ID NO: 45), AAV44.1 (US20030138772 SEQ ID NO: 46), AAV44.5 (US20030138772 SEQ ID NO: 47). AAV223.1 (US20030138772 SEQ ID NO: 48), AAV223.2 (US20030138772 SEQ ID NO: 49), AAV223.4 (US20030138772 SEQ ID NO: 50). AAV223.5 (US20030138772 SEQ ID NO: 51), AAV223.6 (US20030138772 SEQ ID NO: 52), AAV223.7 (US20030138772 SEQ ID NO: 53), AAVA3.4 (US20030138772 SEQ ID NO: 54), AAVA3.5 (US20030138772 SEQ ID NO: 55), AAVA3.7 (US20030138772 SEQ ID NO: 56), AAVA3.3 (US20030138772 SEQ ID NO: 57), AAV42.12 (US20030138772 SEQ ID NO: 58), AAV44.2 (US20030138772 SEQ ID NO: 59), AAV42-2 (US20030138772 SEQ ID NO: 9), or variants thereof.

[0069] In some embodiments, the AAV serotype may be, or have, a sequence as described in United States Publication No. US20150159173, the contents of which are herein incorporated by reference in their entirety, such as, but not limited to, AAV2 (SEQ ID NO: 7 and 23 of US20150159173), rh20 (SEQ ID NO: 1 of US20150159173), rh32/33 (SEQ ID NO: 2 of US20150159173), rh39 (SEQ ID NO: 3, 20 and 36 of US20150159173), rh46 (SEQ ID NO: 4 and 22 of US20150159173), rh73 (SEQ ID NO: 5 of US20150159173), rh74 (SEQ ID NO: 6 of US20150159173), AAV6.1 (SEQ ID NO: 29 of US20150159173), rh.8 (SEQ ID NO: 41 of US20150159173), rh.48.1 (SEQ ID NO: 44 of US20150159173), hu.44 (SEQ ID NO: 45 of US20150159173), hu.29 (SEQ ID NO: 42 of US20150159173), hu.48 (SEQ ID NO: 38 of US20150159173), rh54 (SEQ ID NO: 49 of US20150159173), AAV2 (SEQ ID NO: 7 of US20150159173), cy.5 (SEQ ID NO: 8 and 24 of US20150159173), rh.10 (SEQ ID NO: 9 and 25 of US20150159173), rh.13 (SEQ ID NO: 10 and 26 of US20150159173), AAV1 (SEQ ID NO: 11 and 27 of US20150159173), AAV3 (SEQ ID NO: 12 and 28 of US20150159173), AAV6 (SEQ ID NO: 13 and 29 of US20150159173), AAV7 (SEQ ID NO: 14 and 30 of US20150159173), AAV8 (SEQ ID NO: 15 and 31 of US20150159173), hu.13 (SEQ ID NO: 16 and 32 of US20150159173), hu.26 (SEQ ID NO: 17 and 33 of US20150159173), hu.37 (SEQ ID NO: 18 and 34 of US20150159173), hu.53 (SEQ ID NO: 19 and 35 of US20150159173), rh.43 (SEQ ID NO: 21 and 37 of US20150159173), rh2 (SEQ ID NO: 39 of US20150159173), rh.37 (SEQ ID NO: 40 of US20150159173), rh.64 (SEQ ID NO: 43 of US20150159173), rh.48 (SEQ ID NO: 44 of US20150159173), ch.5 (SEQ ID NO 46 of US20150159173), rh.67 (SEQ ID NO: 47 of US20150159173), rh.58 (SEQ ID NO: 48 of US20150159173), or variants thereof including, but not limited to Cy5R1, Cy5R2, Cy5R3, Cy5R4, rh.13R, rh.37R2, rh.2R, rh.8R, rh.48.1, rh.48.2, rh.48.1.2, hu.44R1, hu.44R2, hu.44R3, hu.29R, ch.5R1, rh64R1, rh64R2, AAV6.2, AAV6.1, AAV6.12, hu.48R1, hu.48R2, and hu.48R3.

[0070] In some embodiments, the AAV serotype may be, or have, a sequence as described in U.S. Pat. No. 7,198,951, the contents of which are herein incorporated by reference in their entirety, such as, but not limited to, AAV9 (SEQ ID NO: 1-3 of U.S. Pat. No. 7,198,951), AAV2 (SEQ ID NO: 4 of U.S. Pat. No. 7,198,951), AAV1 (SEQ ID NO: 5 of U.S. Pat. No. 7,198,951), AAV3 (SEQ ID NO: 6 of U.S. Pat. No. 7,198,951), and AAV8 (SEQ ID NO: 7 of U.S. Pat. No. 7,198,951).

[0071] In some embodiments, the AAV serotype may be, or have, a mutation in the AAV9 sequence as described by N Pulicherla et al. (Molecular Therapy 19(6): 1070-1078 (2011), herein incorporated by reference in its entirety), such as but not limited to, AAV9.9, AAV9.11, AAV9.13, AAV9.16, AAV9.24, AAV9.45, AAV9.47, AAV9.61, AAV9.68, AAV9.84.

[0072] In some embodiments, the AAV serotype may be, or have, a sequence as described in U.S. Pat. No. 6,156,303, the contents of which are herein incorporated by reference in their entirety, such as, but not limited to, AAV3B (SEQ ID NO: 1 and 10 of U.S. Pat. No. 6,156,303), AAV6 (SEQ ID NO: 2, 7 and 11 of U.S. Pat. No. 6,156,303), AAV2 (SEQ ID NO: 3 and 8 of U.S. Pat. No. 6,156,303), AAV3A (SEQ ID NO: 4 and 9, of U.S. Pat. No. 6,156,303), or derivatives thereof.

[0073] In some embodiments, the AAV serotype may be, or have, a sequence as described in United States Publication No. US20140359799, the contents of which are herein incorporated by reference in their entirety, such as, but not limited to, AAV8 (SEQ ID NO: 1 of US20140359799), AAVDJ (SEQ ID NO: 2 and 3 of US20140359799), or variants thereof.

[0074] In some embodiments, the serotype may be AAVDJ (or AAV-DJ) or a variant thereof, such as AAVDJ8 (or AAV-DJ8), as described by Grimm et al. (Journal of Virology 82(12): 5887-5911 (2008), herein incorporated by reference in its entirety). The amino acid sequence of AAVDJ8 may comprise two or more mutations in order to remove the heparin binding domain (HBD). As a non-limiting example, the AAV-DJ sequence described as SEQ ID NO: 1 in U.S. Pat. No. 7,588,772, the contents of which are herein incorporated by reference in their entirety, may comprise two mutations: (1) R587Q where arginine (R; Arg) at amino acid 587 is changed to glutamine (Q; Gin) and (2) R590T where arginine (R Arg) at amino acid 590 is changed to threonine (T; Thr). As another non-limiting example, may comprise three mutations: (1) K406R where lysine (K; Lys) at amino acid 406 is changed to arginine (R; Arg), (2) R587Q where arginine (R: Arg) at amino acid 587 is changed to glutamine (Q; Gin) and (3) R590T where arginine (R; Arg) at amino acid 590 is changed to threonine (T; Thr).

[0075] In some embodiments, the AAV serotype may be, or have, a sequence of AAV4 as described in International Publication No. WO 1998011244, the contents of which are herein incorporated by reference in their entirety, such as, but not limited to AAV4 (SEQ ID NO: 1-20 of WO1998011244).

[0076] In some embodiments, the AAV serotype may be, or have, a mutation in the AAV2 sequence to generate AAV2G9 as described in International Publication No. WO2014144229 and herein incorporated by reference in its entirety.

[0077] In some embodiments, the AAV serotype may be, or have, a sequence as described in International Publication No. WO2005033321, the contents of which are herein incorporated by reference in their entirety, such as, but not limited to AAV3-3 (SEQ ID NO: 217 of WO2005033321), AAV1 (SEQ ID NO: 219 and 202 of WO2005033321), AAV106.1/hu.37 (SEQ ID No: 10 of WO2005033321), AAV114.3/hu.40 (SEQ ID No: 11 of WO2005033321), AAV127.2/hu.41 (SEQ ID NO:6 and 8 of WO2005033321), AAV128.3/hu.44 (SEQ ID No: 81 of WO2005033321), AAV130.4/hu.48 (SEQ ID NO: 78 of WO2005033321), AAV145.1/hu.53 (SEQ ID No: 176 and 177 of WO2005033321), AAV145.6/hu.56 (SEQ ID NO: 168 and 192 of WO2005033321), AAV16.12/hu.11 (SEQ ID NO: 153 and 57 of WO2005033321), AAV16.8/hu.10 (SEQ ID NO: 156 and 56 of WO02005033321), AAV161.10/hu.60 (SEQ ID No: 170 of WO2005033321), AAV161.6/hu.61 (SEQ ID No: 174 of WO2005033321), AAV1-7/rh.48 (SEQ ID NO: 32 of WO2005033321), AAV1-8/rh.49 (SEQ ID NOs: 103 and 25 of WO2005033321), AAV2 (SEQ ID NO: 211 and 221 of WO2005033321), AAV2-15/rh.62 (SEQ ID No: 33 and 114 of WO2005033321), AAV2-3/rh.61 (SEQ ID NO: 21 of WO2005033321). AAV2-4/rh.50 (SEQ ID No: 23 and 108 of WO2005033321), AAV2-5/rh.51 (SEQ ID NO: 104 and 22 of WO2005033321), AAV3.1/hu.6 (SEQ ID NO: 5 and 84 of WO2005033321), AAV3.1/hu.9 (SEQ ID NO: 155 and 58 of WO2005033321), AAV3-11/rh.53 (SEQ ID NO: 186 and 176 of WO2005033321), AAV3-3 (SEQ ID NO: 200 of WO2005033321), AAV33.12/hu.17 (SEQ ID NO:4 of WO2005033321), AAV33.4/hu.15 (SEQ ID No: 50 of WO2005033321), AAV33.8/hu.16 (SEQ ID No: 51 of WO2005033321), AAV3-9/rh.52 (SEQ ID NO: 96 and 18 of WO2005033321), AAV4-19/rh.55 (SEQ ID NO: 117 of WO2005033321), AAV4-4 (SEQ ID NO: 201 and 218 of WO2005033321), AAV4-9/rh.54 (SEQ ID NO: 116 of WO2005033321), AAV5 (SEQ ID NO: 199 and 216 of WO2005033321), AAV52.1/hu.20 (SEQ ID NO: 63 of WO2005033321), AAV52/hu.19 (SEQ ID NO: 133 of WO2005033321), AAV5-22/rh.58 (SEQ ID No: 27 of WO2005033321), AAV5-3/rh.57 (SEQ ID NO: 105 of WO2005033321), AAV5-3/rh.57 (SEQ ID No: 26 of WO2005033321), AAV58.2/hu.25 (SEQ ID No: 49 of WO2005033321), AAV6 (SEQ ID NO: 203 and 220 of WO2005033321), AAV7 (SEQ ID NO: 222 and 213 of WO2005033321), AAV7.3/hu.7 (SEQ ID No: 55 of WO2005033321), AAV8 (SEQ ID NO: 223 and 214 of WO2005033321), AAVH-1/hu.1 (SEQ ID No: 46 of WO2005033321), AAVH-5/hu.3 (SEQ ID No: 44 of WO2005033321), AAVhu.1 (SEQ ID NO: 144 of WO2005033321), AAVhu.10 (SEQ ID NO: 156 of WO2005033321), AAVhu.11 (SEQ ID NO: 153 of WO2005033321), AAVhu.12 (WO2005033321 SEQ ID NO: 59), AAVhu.13 (SEQ ID NO: 129 of WO2005033321), AAVhu.14/AAV9 (SEQ ID NO: 123 and 3 of WO2005033321), AAVhu.15 (SEQ ID NO: 147 of WO2005033321), AAVhu.16 (SEQ ID NO: 148 of WO2005033321), AAVhu.17 (SEQ ID NO: 83 of WO2005033321), AAVhu.18 (SEQ ID NO: 149 of WO2005033321), AAVhu.19 (SEQ ID NO: 133 of WO2005033321), AAVhu.2 (SEQ ID NO: 143 of WO2005033321), AAVhu.20 (SEQ ID NO: 134 of WO2005033321), AAVhu.21 (SEQ ID NO: 135 of WO2005033321), AAVhu.22 (SEQ ID NO: 138 of WO2005033321), AAVhu.23.2 (SEQ ID NO: 137 of WO02005033321), AAVhu.24 (SEQ ID NO: 136 of WO2005033321), AAVhu.25 (SEQ ID NO: 146 of WO2005033321), AAVhu.27 (SEQ ID NO: 140 of WO2005033321), AAVhu.29 (SEQ ID NO: 132 of WO2005033321). AAVhu.3 (SEQ ID NO: 145 of WO2005033321), AAVhu.31 (SEQ ID NO: 121 of WO2005033321), AAVhu.32 (SEQ ID NO: 122 of WO2005033321), AAVhu.34 (SEQ ID NO: 125 of WO2005033321), AAVhu.35 (SEQ ID NO: 164 of WO2005033321), AAVhu.37 (SEQ ID NO: 88 of WO2005033321), AAVhu.39 (SEQ ID NO: 102 of WO2005033321), AAVhu.4 (SEQ ID NO: 141 of WO2005033321), AAVhu.40 (SEQ ID NO: 87 of WO2005033321), AAVhu.41 (SEQ ID NO: 91 of WO2005033321), AAVhu.42 (SEQ ID NO: 85 of WO2005033321), AAVhu.43 (SEQ ID NO: 160 of WO2005033321), AAVhu.44 (SEQ ID NO: 144 of WO2005033321), AAVhu.45 (SEQ ID NO: 127 of WO2005033321), AAVhu.46 (SEQ ID NO: 159 of WO2005033321), AAVhu.47 (SEQ ID NO: 128 of WO2005033321), AAVhu.48 (SEQ ID NO: 157 of WO2005033321), AAVhu.49 (SEQ ID NO: 189 of WO2005033321), AAVhu.51 (SEQ ID NO: 190 of WO2005033321), AAVhu.52 (SEQ ID NO: 191 of WO2005033321), AAVhu.53 (SEQ ID NO: 186 of WO02005033321), AAVhu.54 (SEQ ID NO: 188 of WO02005033321), AAVhu.55 (SEQ ID NO: 187 of WO2005033321), AAVhu.56 (SEQ ID NO: 192 of WO2005033321), AAVhu.57 (SEQ ID NO: 193 of WO2005033321), AAVhu.58 (SEQ ID NO: 194 of WO2005033321), AAVhu.6 (SEQ ID NO: 84 of WO2005033321), AAVhu.60 (SEQ ID NO: 184 of WO2005033321), AAVhu.61 (SEQ ID NO: 185 of WO2005033321), AAVhu.63 (SEQ ID NO: 195 of WO2005033321), AAVhu.64 (SEQ ID NO: 196 of WO2005033321), AAVhu.66 (SEQ ID NO: 197 of WO2005033321), AAVhu.67 (SEQ ID NO: 198 of WO2005033321), AAVhu.7 (SEQ ID NO: 150 of WO2005033321), AAVhu.8 (WO2005033321 SEQ ID NO: 12), AAVhu.9 (SEQ ID NO: 155 of WO2005033321), AAVLG-10/rh.40 (SEQ ID No: 14 of WO2005033321), AAVLG-4/rh.38 (SEQ ID NO: 86 of WO2005033321), AAVLG-4/rh.38 (SEQ ID No: 7 of WO2005033321), AAVN721-8/rh.43 (SEQ ID NO: 163 of WO2005033321), AAVN721-8/rh.43 (SEQ ID No: 43 of WO2005033321), AAVpi.1 (WO2005033321 SEQ ID NO: 28), AAVpi.2 (WO2005033321 SEQ ID NO: 30), AAVpi.3 (WO2005033321 SEQ ID NO: 29), AAVrh.38 (SEQ ID NO: 86 of WO2005033321), AAVrh.40 (SEQ ID NO: 92 of WO2005033321), AAVrh.43 (SEQ ID NO: 163 of WO2005033321), AAVrh.44 (WO2005033321 SEQ ID NO: 34), AAVrh.45 (WO2005033321 SEQ ID NO: 41), AAVrh.47 (WO02005033321 SEQ ID NO: 38), AAVrh.48 (SEQ ID NO: 115 of WO2005033321), AAVrh.49 (SEQ ID NO: 103 of WO2005033321), AAVrh.50 (SEQ ID NO: 108 of WO2005033321), AAVrh.51 (SEQ ID NO: 104 of WO2005033321), AAVrh.52 (SEQ ID NO: 96 of WO2005033321), AAVrh.53 (SEQ ID NO: 97 of WO2005033321), AAVrh.55 (WO2005033321 SEQ ID NO: 37), AAVrh.56 (SEQ ID NO: 152 of WO2005033321), AAVrh.57 (SEQ ID NO: 105 of WO2005033321), AAVrh.58 (SEQ ID NO: 106 of WO2005033321), AAVrh.59 (WO2005033321 SEQ ID NO: 42), AAVrh.60 (WO2005033321 SEQ ID NO: 31), AAVrh.61 (SEQ ID NO: 107 of WO02005033321), AAVrh.62 (SEQ ID NO: 114 of WO2005033321), AAVrh.64 (SEQ ID NO: 99 of WO2005033321), AAVrh.65 (WO2005033321 SEQ ID NO: 35), AAVrh.68 (WO2005033321 SEQ ID NO: 16), AAVrh.69 (WO2005033321 SEQ ID NO: 39), AAVrh.70 (WO2005033321 SEQ ID NO: 20), AAVrh.72 (WO2005033321 SEQ ID NO: 9), or variants thereof including, but not limited to, AAVcy.2. AAVcy.3. AAVcy.4, AAVcy.5, AAVcy.6, AAVrh.12, AAVrh.17, AAVrh.18, AAVrh.19, AAVrh.21, AAVrh.22, AAVrh.23, AAVrh.24, AAVrh.25, AAVrh.25/42 15, AAVrh.31. AAVrh.32. AAVrh.33, AAVrh.34, AAVrh.35, AAVrh.36, AAVrh.37, AAVrh14. Non limiting examples of variants include SEQ ID NO: 13, 15, 17, 19, 24, 36, 40, 45, 47, 48, 51-54, 60-62, 64-77, 79, 80, 82, 89, 90, 93-95, 98, 100, 101, 109-113, 118-120, 124, 126, 131, 139, 142, 151, 154, 158, 161, 162, 165-183, 202, 204-212, 215, 219, 224-236, of WO2005033321, the contents of which are herein incorporated by reference in their entirety.

[0078] In some embodiments, the AAV serotype may be, or have, a sequence as described in International Publication No. WO2015168666, the contents of which are herein incorporated by reference in their entirety, such as, but not limited to, AAVrh8R (SEQ ID NO: 9 of WO2015168666). AAVrh8R A586R mutant (SEQ ID NO: 10 of WO2015168666), AAVrh8R R533A mutant (SEQ ID NO: 11 of WO2015168666), or variants thereof.

[0079] In some embodiments, the AAV serotype may be, or have, a sequence as described in U.S. Pat. No. 9,233,131, the contents of which are herein incorporated by reference in their entirety, such as, but not limited to, AAVhE1.1 (SEQ ID NO:44 of U.S. Pat. No. 9,233,131), AAVhEr1.5 (SEQ ID NO:45 of U.S. Pat. No. 9,233,131), AAVhER1.14 (SEQ ID NO:46 of U.S. Pat. No. 9,233,131), AAVhEr1.8 (SEQ ID NO:47 of U.S. Pat. No. 9,233,131), AAVhEr1.16 (SEQ ID NO:48 of U.S. Pat. No. 9,233,131), AAVhEr1.18 (SEQ ID NO:49 of U.S. Pat. No. 9,233,131), AAVhEr1.35 (SEQ ID NO:50 of U.S. Pat. No. 9,233,131), AAVhEr1.7 (SEQ ID NO:51 of U.S. Pat. No. 9,233,131), AAVhEr1.36 (SEQ ID NO:52 of U.S. Pat. No. 9,233,131), AAVhEr2.29 (SEQ ID NO:53 of U.S. Pat. No. 9,233,131), AAVhEr2.4 (SEQ ID NO:54 of U.S. Pat. No. 9,233,131), AAVhEr2.16 (SEQ ID NO:55 of U.S. Pat. No. 9,233,131), AAVhEr2.30 (SEQ ID NO:56 of U.S. Pat. No. 9,233,131), AAVhEr2.31 (SEQ ID NO:58 of U.S. Pat. No. 9,233,131), AAVhEr2.36 (SEQ ID NO:57 of U.S. Pat. No. 9,233,131), AAVhER1.23 (SEQ ID NO:53 of U.S. Pat. No. 9,233,131), AAVhEr3.1 (SEQ ID NO:59 of U.S. Pat. No. 9,233,131), AAV2.5T (SEQ ID NO:42 of U.S. Pat. No. 9,233,131), or variants thereof.

[0080] In some embodiments, the AAV serotype may be, or have, a sequence as described in United States Patent Publication No. US20150376607, the contents of which are herein incorporated by reference in their entirety, such as, but not limited to, AAV-PAEC (SEQ ID NO:1 of US20150376607). AAV-LK01 (SEQ ID NO:2 of US20150376607), AAV-LK02 (SEQ ID NO:3 of US20150376607), AAV-LK03 (SEQ ID NO:4 of US20150376607), AAV-LK04 (SEQ ID NO:5 of US20150376607), AAV-LK05 (SEQ ID NO:6 of US20150376607). AAV-LK06 (SEQ ID NO:7 of US20150376607), AAV-LK07 (SEQ ID NO:8 of US20150376607), AAV-LK08 (SEQ ID NO:9 of US20150376607), AAV-LK09 (SEQ ID NO: 10 of US20150376607), AAV-LK10 (SEQ ID NO: 11 of US20150376607), AAV-LK11 (SEQ ID NO:12 of US20150376607), AAV-LK12 (SEQ ID NO: 13 of US20150376607), AAV-LK13 (SEQ ID NO: 14 of US20150376607), AAV-LK14 (SEQ ID NO: 15 of US20150376607), AAV-LK15 (SEQ ID NO: 16 of US20150376607), AAV-LK16 (SEQ ID NO: 17 of US20150376607), AAV-LK17 (SEQ ID NO:18 of US20150376607), AAV-LK18 (SEQ ID NO: 19 of US20150376607), AAV-LK19 (SEQ ID NO:20 of US20150376607), AAV-PAEC2 (SEQ ID NO:21 of US20150376607), AAV-PAEC4 (SEQ ID NO:22 of US20150376607), AAV-PAEC6 (SEQ ID NO:23 of US20150376607), AAV-PAEC7 (SEQ ID NO:24 of US20150376607), AAV-PAEC8 (SEQ ID NO:25 of US20150376607). AAV-PAEC11 (SEQ ID NO:26 of US20150376607), AAV-PAEC12 (SEQ ID NO:27, of US20150376607), or variants thereof.

[0081] In some embodiments, the AAV serotype may be, or have, a sequence as described in U.S. Pat. No. 9,163,261, the contents of which are herein incorporated by reference in their entirety, such as, but not limited to, AAV-2-pre-miRNA-101 (SEQ ID NO: 1 U.S. Pat. No. 9,163,261), or variants thereof.

[0082] In some embodiments, the AAV serotype may be, or have, a sequence as described in United States Patent Publication No. US20150376240, the contents of which are herein incorporated by reference in their entirety, such as, but not limited to, AAV-8h (SEQ ID NO: 6 of US20150376240), AAV-8b (SEQ ID NO: 5 of US20150376240), AAV-h (SEQ ID NO: 2 of US20150376240), AAV-b (SEQ ID NO: 1 of US20150376240), or variants thereof.

[0083] In some embodiments, the AAV serotype may be, or have, a sequence as described in United States Patent Publication No. US20160017295, the contents of which are herein incorporated by reference in their entirety, such as, but not limited to, AAV SM 10-2 (SEQ ID NO: 22 of US20160017295), AAV Shuffle 100-1 (SEQ ID NO: 23 of US20160017295), AAV Shuffle 100-3 (SEQ ID NO: 24 of US20160017295), AAV Shuffle 100-7 (SEQ ID NO: 25 of US20160017295), AAV Shuffle 10-2 (SEQ ID NO: 34 of US20160017295). AAV Shuffle 10-6 (SEQ ID NO: 35 of US20160017295), AAV Shuffle 10-8 (SEQ ID NO: 36 of US20160017295), AAV Shuffle 100-2 (SEQ ID NO: 37 of US20160017295), AAV SM 10-1 (SEQ ID NO: 38 of US20160017295). AAV SM 10-8 (SEQ ID NO: 39 of US20160017295), AAV SM 100-3 (SEQ ID NO: 40 of US20160017295), AAV SM 100-10 (SEQ ID NO: 41 of US20160017295), or variants thereof.

[0084] In some embodiments, the AAV serotype may be, or have, a sequence as described in United States Patent Publication No. US20150238550, the contents of which are herein incorporated by reference in their entirety, such as, but not limited to, BNP61 AAV (SEQ ID NO: 1 of US20150238550), BNP62 AAV (SEQ ID NO: 3 of US20150238550), BNP63 AAV (SEQ ID NO: 4 of US20150238550), or variants thereof.

[0085] In some embodiments, the AAV serotype may be or may have a sequence as described in United States Patent Publication No. US20150315612, the contents of which are herein incorporated by reference in their entirety, such as, but not limited to, AAVrh.50 (SEQ ID NO: 108 of US20150315612), AAVrh.43 (SEQ ID NO: 163 of US20150315612), AAVrh.62 (SEQ ID NO: 114 of US20150315612), AAVrh.48 (SEQ ID NO: 115 of US20150315612), AAVhu.19 (SEQ ID NO: 133 of US20150315612), AAVhu.11 (SEQ ID NO: 153 of US20150315612), AAVhu.53 (SEQ ID NO: 186 of US20150315612), AAV4-8/rh.64 (SEQ ID No: 15 of US20150315612), AAVLG-9/hu.39 (SEQ ID No: 24 of US20150315612), AAV54.5/hu.23 (SEQ ID No: 60 of US20150315612), AAV54.2/hu.22 (SEQ ID No: 67 of US20150315612), AAV54.7/hu.24 (SEQ ID No: 66 of US20150315612), AAV54.1/hu.21 (SEQ ID No: 65 of US20150315612), AAV54.4R/hu.27 (SEQ ID No: 64 of US20150315612), AAV46.2/hu.28 (SEQ ID No: 68 of US20150315612), AAV46.6/hu.29 (SEQ ID No: 69 of US20150315612), AAV128.1/hu.43 (SEQ ID No: 80 of US20150315612), or variants thereof.

[0086] In some embodiments, the AAV serotype may be, or have, a sequence as described in International Publication No. WO2015121501, the contents of which are herein incorporated by reference in their entirety, such as, but not limited to, true type AAV (ttAAV) (SEQ ID NO: 2 of WO2015121501), “UPenn AAV10” (SEQ ID NO: 8 of WO2015121501), “Japanese AAV10” (SEQ ID NO: 9 of WO2015121501), or variants thereof.

[0087] According to the present invention, AAV capsid serotype selection or use may be from a variety of species. In one embodiment, the AAV may be an avian AAV (AAAV). The AAAV serotype may be, or have, a sequence as described in U.S. Pat. No. 9,238,800, the contents of which are herein incorporated by reference in their entirety, such as, but not limited to, AAAV (SEQ ID NO: 1, 2, 4, 6, 8, 10, 12, and 14 of U.S. Pat. No. 9,238,800), or variants thereof.

[0088] In one embodiment, the AAV may be a bovine AAV (BAAV). The BAAV serotype may be, or have, a sequence as described in U.S. Pat. No. 9,193,769, the contents of which are herein incorporated by reference in their entirety, such as, but not limited to, BAAV (SEQ ID NO: 1 and 6 of U.S. Pat. No. 9,193,769), or variants thereof. The BAAV serotype may be or have a sequence as described in U.S. Pat. No. 7,427,396, the contents of which are herein incorporated by reference in their entirety, such as, but not limited to, BAAV (SEQ ID NO: 5 and 6 of U.S. Pat. No. 7,427,396), or variants thereof.

[0089] In one embodiment, the AAV may be a caprine AAV. The caprine AAV serotype may be, or have, a sequence as described in U.S. Pat. No. 7,427,396, the contents of which are herein incorporated by reference in their entirety, such as, but not limited to, caprine AAV (SEQ ID NO: 3 of U.S. Pat. No. 7,427,396), or variants thereof.

[0090] In other embodiments the AAV may be engineered as a hybrid AAV from two or more parental serotypes. In one embodiment, the AAV may be AAV2G9 which comprises sequences from AAV2 and AAV9. The AAV2G9 AAV serotype may be, or have, a sequence as described in United States Patent Publication No. US20160017005, the contents of which are herein incorporated by reference in its entirety.

[0091] In one embodiment, the AAV may be a serotype generated by the AAV9 capsid library with mutations in amino acids 390-627 (VP1 numbering) as described by Pulicherla et al. (Molecular Therapy 19(6): 1070-1078 (2011), the contents of which are herein incorporated by reference in their entirety. The serotype and corresponding nucleotide and amino acid substitutions may be, but is not limited to, AAV9.1 (G1594C; D532H), AAV6.2 (T1418A and T1436X; V473D and 1479K), AAV9.3 (T1238A; F413Y), AAV9.4 (T1250C and A1617T; F417S), AAV9.5 (A1235G, A1314T, A1642G, C1760T; Q412R, T548A, A587V), AAV9.6 (T1231A; F411I), AAV9.9 (G1203A, G1785T; W595C), AAV9.10 (A1500G, T1676C; M559T), AAV9.11 (A1425T, A1702C, A1769T; T568P, Q590L), AAV9.13 (A1369C, A1720T; N457H, T574S), AAV9.14 (T1340A, T1362C, T1560C, G1713A; L447H), AAV9.16 (A1775T; Q592L), AAV9.24 (T1507C, T1521G; W503R), AAV9.26 (A1337G, A1769C; Y446C, Q590P), AAV9.33 (A1667C; D556A), AAV9.34 (A1534G, C1794T N512D), AAV9.35 (A1289T, T1450A, C1494T, A1515T, C1794A, G1816A; Q430L, Y484N, N98K, V6061), AAV9.40 (A1694T, E565V), AAV9.41 (A1348T, T1362C; T450S), AAV9.44 (A1684C, A1701T, A1737G; N562H, K567N), AAV9.45 (A1492T, C1804T; N498Y, L602F), AAV9.46 (G1441C, T1525C, T1549G; G481R, W509R, L517V), 9.47 (G1241A, G1358A, A1669G, C1745T; S414N, G453D, K557E, T5821), AAV9.48 (C1445T, A1736T; P482L, Q579L), AAV9.50 (A1638T, C1683T, T1805A; Q546H, L602H), AAV9.53 (G1301A, A1405C, C1664T, G1811T; R134Q, S469R, A555V, G604V), AAV9.54 (C1531A, T1609A; L511I, L537M), AAV9.55 (T1605A; F535L), AAV9.58 (C1475T, C1579A, T4921, H527N), AAV.59 (T1336C; Y446H), AAV9.61 (A1493T; N498I), AAV9.64 (C1531A, A1617T; L511I), AAV9.65 (C1335T, T1530C, C1568A; A523D), AAV9.68 (C1510A; P504T), AAV9.80 (G1441A; G481R), AAV9.83 (C1402A, A1500T; P468T, E500D), AAV9.87 (T1464C, T1468C; S490P), AAV9.90 (A1196T; Y399F), AAV9.91 (T1316G, A1583T, C1782G, T1806C; L439R, K528I), AAV9.93 (A1273G, A1421G, A1638C, C1712T, G1732A, A1744T, A1832T; S425G, Q474R, Q546H, P571L, G578R, T582S, D611V), AAV9.94 (A1675T; M559L) and AAV9.95 (T1605A; F535L).

[0092] In some embodiments, the AAV serotype may be, or have, a sequence as described in International Publication No. WO2016049230, the contents of which are herein incorporated by reference in their entirety, such as, but not limited to AAVF1/HSC1 (SEQ ID NO: 2 and 20 of WO2016049230), AAVF2/HSC2 (SEQ ID NO: 3 and 21 of WO2016049230), AAVF3/HSC3 (SEQ ID NO: 5 and 22 of WO2016049230), AAVF4/HSC4 (SEQ ID NO: 6 and 23 of WO2016049230), AAVF5/HSC5 (SEQ ID NO: 11 and 25 of WO2016049230), AAVF6/HSC6 (SEQ ID NO: 7 and 24 of WO2016049230), AAVF7/HSC7 (SEQ ID NO: 8 and 27 of WO02016049230), AAVF8/HSC8 (SEQ ID NO: 9 and 28 of WO2016049230), AAVF9/HSC9 (SEQ ID NO: 10 and 29 of WO2016049230), AAVF11/HSC11 (SEQ ID NO: 4 and 26 of WO2016049230), AAVF12/HSC12 (SEQ ID NO: 12 and 30 of WO2016049230), AAVF13/HSC13 (SEQ ID NO: 14 and 31 of WO2016049230), AAVF14/HSC14 (SEQ ID NO: 15 and 32 of WO2016049230), AAVF15/HSC15 (SEQ ID NO: 16 and 33 of WO2016049230), AAVF16/HSC16 (SEQ ID NO: 17 and 34 of WO2016049230), AAVF17/HSC17 (SEQ ID NO: 13 and 35 of WO2016049230), or variants or derivatives thereof.

[0093] In some embodiments, the AAV serotype may be, or have, a sequence as described in U.S. Pat. No. 8,734,809, the contents of which are herein incorporated by reference in their entirety, such as, but not limited to, AAV CBr-E1 (SEQ ID NO: 13 and 87 of U.S. Pat. No. 8,734,809), AAV CBr-E2 (SEQ ID NO: 14 and 88 of U.S. Pat. No. 8,734,809), AAV CBr-E3 (SEQ ID NO: 15 and 89 of U.S. Pat. No. 8,734,809), AAV CBr-E4 (SEQ ID NO: 16 and 90 of U.S. Pat. No. 8,734,809), AAV CBr-E5 (SEQ ID NO: 17 and 91 of U.S. Pat. No. 8,734,809), AAV CBr-e5 (SEQ ID NO: 18 and 92 of U.S. Pat. No. 8,734,809), AAV CBr-E6 (SEQ ID NO: 19 and 93 of U.S. Pat. No. 8,734,809), AAV CBr-E7 (SEQ ID NO: 20 and 94 of U.S. Pat. No. 8,734,809), AAV CBr-E8 (SEQ ID NO: 21 and 95 of U.S. Pat. No. 8,734,809), AAV CLv-D1 (SEQ ID NO: 22 and 96 of U.S. Pat. No. 8,734,809), AAV CLv-D2 (SEQ ID NO: 23 and 97 of U.S. Pat. No. 8,734,809), AAV CLv-D3 (SEQ ID NO: 24 and 98 of U.S. Pat. No. 8,734,809), AAV CLv-D4 (SEQ ID NO: 25 and 99 of U.S. Pat. No. 8,734,809), AAV CLv-D5 (SEQ ID NO: 26 and 100 of U.S. Pat. No. 8,734,809), AAV CLv-D6 (SEQ ID NO: 27 and 101 of U.S. Pat. No. 8,734,809), AAV CLv-D7 (SEQ ID NO: 28 and 102 of U.S. Pat. No. 8,734,809), AAV CLv-D8 (SEQ ID NO: 29 and 103 of U.S. Pat. No. 8,734,809), AAV CLv-E1 (SEQ ID NO: 13 and 87 of U.S. Pat. No. 8,734,809), AAV CLv-R1 (SEQ ID NO: 30 and 104 of U.S. Pat. No. 8,734,809), AAV CLv-R2 (SEQ ID NO: 31 and 105 of U.S. Pat. No. 8,734,809), AAV CLv-R3 (SEQ ID NO: 32 and 106 of U.S. Pat. No. 8,734,809), AAV CLv-R4 (SEQ ID NO: 33 and 107 of U.S. Pat. No. 8,734,809), AAV CLv-R5 (SEQ ID NO: 34 and 108 of U.S. Pat. No. 8,734,809), AAV CLv-R6 (SEQ ID NO: 35 and 109 of U.S. Pat. No. 8,734,809), AAV CLv-R7 (SEQ ID NO: 36 and 110 of U.S. Pat. No. 8,734,809), AAV CLv-R8 (SEQ ID NO: 37 and 111 of U.S. Pat. No. 8,734,809), AAV CLv-R9 (SEQ ID NO: 38 and 112 of US8734809), AAV CLg-F1 (SEQ ID NO: 39 and 113 of U.S. Pat. No. 8,734,809), AAV CLg-F2 (SEQ ID NO: 40 and 114 of U.S. Pat. No. 8,734,809), AAV CLg-F3 (SEQ ID NO: 41 and 115 of U.S. Pat. No. 8,734,809), AAV CLg-F4 (SEQ ID NO: 42 and 116 of U.S. Pat. No. 8,734,809), AAV CLg-F5 (SEQ ID NO: 43 and 117 of U.S. Pat. No. 8,734,809), AAV CLg-F6 (SEQ ID NO: 43 and 117 of U.S. Pat. No. 8,734,809), AAV CLg-F7 (SEQ ID NO: 44 and 118 of U.S. Pat. No. 8,734,809), AAV CLg-F8 (SEQ ID NO: 43 and 17 of U.S. Pat. No. 8,734,809), AAV CSp-1 (SEQ ID NO: 45 and 119 of U.S. Pat. No. 8,734,809), AAV CSp-10 (SEQ ID NO: 46 and 120 of U.S. Pat. No. 8,734,809), AAV CSp-11 (SEQ ID NO: 47 and 121 of U.S. Pat. No. 8,734,809), AAV CSp-2 (SEQ ID NO: 48 and 122 of U.S. Pat. No. 8,734,809), AAV CSp-3 (SEQ ID NO: 49 and 123 of U.S. Pat. No. 8,734,809), AAV CSp-4 (SEQ ID NO: 50 and 124 of U.S. Pat. No. 8,734,809), AAV CSp-6 (SEQ ID NO: 51 and 125 of U.S. Pat. No. 8,734,809), AAV CSp-7 (SEQ ID NO: 52 and 126 of U.S. Pat. No. 8,734,809), AAV CSp-8 (SEQ ID NO: 53 and 127 of U.S. Pat. No. 8,734,809), AAV CSp-9 (SEQ ID NO: 54 and 128 of U.S. Pat. No. 8,734,809), AAV CHt-2 (SEQ ID NO: 55 and 129 of U.S. Pat. No. 8,734,809), AAV CHt-3 (SEQ ID NO: 56 and 130 of U.S. Pat. No. 8,734,809), AAV CKd-1 (SEQ ID NO: 57 and 131 of U.S. Pat. No. 8,734,809), AAV CKd-10 (SEQ ID NO: 58 and 132 of U.S. Pat. No. 8,734,809), AAV CKd-2 (SEQ ID NO: 59 and 133 of U.S. Pat. No. 8,734,809), AAV CKd-3 (SEQ ID NO: 60 and 134 of U.S. Pat. No. 8,734,809), AAV CKd-4 (SEQ ID NO: 61 and 135 of U.S. Pat. No. 8,734,809), AAV CKd-6 (SEQ ID NO: 62 and 136 of U.S. Pat. No. 8,734,809), AAV CKd-7 (SEQ ID NO: 63 and 137 of U.S. Pat. No. 8,734,809), AAV CKd-8 (SEQ ID NO: 64 and 138 of U.S. Pat. No. 8,734,809), AAV CLv-1 (SEQ ID NO: 35 and 139 of U.S. Pat. No. 8,734,809), AAV CLv-12 (SEQ ID NO: 66 and 140 of U.S. Pat. No. 8,734,809), AAV CLv-13 (SEQ ID NO: 67 and 141 of U.S. Pat. No. 8,734,809), AAV CLv-2 (SEQ ID NO: 68 and 142 of U.S. Pat. No. 8,734,809), AAV CLv-3 (SEQ ID NO: 69 and 143 of U.S. Pat. No. 8,734,809), AAV CLv-4 (SEQ ID NO: 70 and 144 of U.S. Pat. No. 8,734,809), AAV CLv-6 (SEQ ID NO: 71 and 145 of U.S. Pat. No. 8,734,809), AAV CLv-8 (SEQ ID NO: 72 and 146 of U.S. Pat. No. 8,734,809), AAV CKd-B1 (SEQ ID NO: 73 and 147 of U.S. Pat. No. 8,734,809), AAV CKd-B2 (SEQ ID NO: 74 and 148 of U.S. Pat. No. 8,734,809), AAV CKd-B3 (SEQ ID NO: 75 and 149 of U.S. Pat. No. 8,734,809), AAV CKd-B4 (SEQ ID NO: 76 and 150 of U.S. Pat. No. 8,734,809), AAV CKd-B5 (SEQ ID NO: 77 and 151 of U.S. Pat. No. 8,734,809), AAV CKd-B6 (SEQ ID NO: 78 and 152 of U.S. Pat. No. 8,734,809), AAV CKd-B7 (SEQ ID NO: 79 and 153 of U.S. Pat. No. 8,734,809), AAV CKd-B8 (SEQ ID NO: 80 and 154 of U.S. Pat. No. 8,734,809), AAV CKd-H1 (SEQ ID NO: 81 and 155 of U.S. Pat. No. 8,734,809), AAV CKd-H2 (SEQ ID NO: 82 and 156 of U.S. Pat. No. 8,734,809), AAV CKd-H3 (SEQ ID NO: 83 and 157 of U.S. Pat. No. 8,734,809), AAV CKd-H4 (SEQ ID NO: 84 and 158 of U.S. Pat. No. 8,734,809), AAV CKd-H5 (SEQ ID NO: 85 and 159 of U.S. Pat. No. 8,734,809), AAV CKd-H6 (SEQ ID NO: 77 and 151 of U.S. Pat. No. 8,734,809), AAV CHt-1 (SEQ ID NO: 86 and 160 of U.S. Pat. No. 8,734,809), AAV CLv1-1 (SEQ ID NO: 171 of U.S. Pat. No. 8,734,809), AAV CLv1-2 (SEQ ID NO: 172 of U.S. Pat. No. 8,734,809), AAV CLv1-3 (SEQ ID NO: 173 of U.S. Pat. No. 8,734,809), AAV CLv1-4 (SEQ ID NO: 174 of U.S. Pat. No. 8,734,809), AAV Clv1-7 (SEQ ID NO: 175 of U.S. Pat. No. 8,734,809), AAV Clv1-8 (SEQ ID NO: 176 of U.S. Pat. No. 8,734,809), AAV Clv1-9 (SEQ ID NO: 177 of U.S. Pat. No. 8,734,809), AAV Clv1-10 (SEQ ID NO: 178 of U.S. Pat. No. 8,734,809), AAV.VR-355 (SEQ ID NO: 181 of U.S. Pat. No. 8,734,809), AAV.hu.48R3 (SEQ ID NO: 183 of U.S. Pat. No. 8,734,809), or variants or derivatives thereof.

[0094] In some embodiments, the AAV serotype may be, or have, a sequence as described in International Publication No. WO2016065001, the contents of which are herein incorporated by reference in their entirety, such as, but not limited to AAV CHt-P2 (SEQ ID NO: 1 and 51 of WO2016065001), AAV CHt-PS (SEQ ID NO: 2 and 52 of WO2016065001), AAV CHt-P9 (SEQ ID NO: 3 and 53 of WO2016065001), AAV CBr-7.1 (SEQ ID NO: 4 and 54 of WO2016065001), AAV CBr-7.2 (SEQ ID NO: 5 and 55 of WO2016065001), AAV CBr-7.3 (SEQ ID NO: 6 and 56 of WO2016065001), AAV CBr-7.4 (SEQ ID NO: 7 and 57 of WO2016065001), AAV CBr-7.5 (SEQ ID NO: 8 and 58 of WO2016065001), AAV CBr-7.7 (SEQ ID NO: 9 and 59 of WO2016065001), AAV CBr-7.8 (SEQ ID NO: 10 and 60 of WO2016065001), AAV CBr-7.10 (SEQ ID NO: 11 and 61 of WO2016065001), AAV CKd-N3 (SEQ ID NO: 12 and 62 of WO2016065001), AAV CKd-N4 (SEQ ID NO: 13 and 63 of WO2016065001), AAV CKd-N9 (SEQ ID NO: 14 and 64 of WO2016065001), AAV CLv-L4 (SEQ ID NO: 15 and 65 of WO2016065001), AAV CLv-L5 (SEQ ID NO: 16 and 66 of WO2016065001), AAV CLv-L6 (SEQ ID NO: 17 and 67 of WO2016065001), AAV CLv-K1 (SEQ ID NO: 18 and 68 of WO2016065001), AAV CLv-K3 (SEQ ID NO: 19 and 69 of WO2016065001), AAV CLv-K6 (SEQ ID NO: 20 and 70 of WO2016065001), AAV CLv-M1 (SEQ ID NO: 21 and 71 of WO2016065001), AAV CLv-M11 (SEQ ID NO: 22 and 72 of WO2016065001), AAV CLv-M2 (SEQ ID NO: 23 and 73 of WO2016065001), AAV CLv-M5 (SEQ ID NO: 24 and 74 of WO2016065001), AAV CLv-M6 (SEQ ID NO: 25 and 75 of WO2016065001), AAV CLv-M7 (SEQ ID NO: 26 and 76 of WO2016065001), AAV CLv-M8 (SEQ ID NO: 27 and 77 of WO2016065001), AAV CLv-M9 (SEQ ID NO: 28 and 78 of WO2016065001), AAV CHt-P1 (SEQ ID NO: 29 and 79 of WO2016065001), AAV CHt-P6 (SEQ ID NO: 30 and 80 of WO2016065001), AAV CHt-P8 (SEQ ID NO: 31 and 81 of WO2016065001), AAV CHt-6.1 (SEQ ID NO: 32 and 82 of WO2016065001), AAV CHt-6.10 (SEQ ID NO: 33 and 83 of WO2016065001), AAV CHt-6.5 (SEQ ID NO: 34 and 84 of WO2016065001), AAV CHt-6.6 (SEQ ID NO: 35 and 85 of WO2016065001), AAV CHt-6.7 (SEQ ID NO: 36 and 86 of WO2016065001), AAV CHt-6.8 (SEQ ID NO: 37 and 87 of WO2016065001), AAV CSp-8.10 (SEQ ID NO: 38 and 88 of WO2016065001), AAV CSp-8.2 (SEQ ID NO: 39 and 89 of WO2016065001), AAV CSp-8.4 (SEQ ID NO: 40 and 90 of WO2016065001), AAV CSp-8.5 (SEQ ID NO: 41 and 91 of WO2016065001), AAV CSp-8.6 (SEQ ID NO: 42 and 92 of WO2016065001), AAV CSp-8.7 (SEQ ID NO: 43 and 93 of WO2016065001), AAV CSp-8.8 (SEQ ID NO: 44 and 94 of WO2016065001), AAV CSp-8.9 (SEQ ID NO: 45 and 95 of WO2016065001), AAV CBr-B7.3 (SEQ ID NO: 46 and 96 of WO2016065001), AAV CBr-B7.4 (SEQ ID NO: 47 and 97 of WO2016065001), AAV3B (SEQ ID NO: 48 and 98 of WO2016065001), AAV4 (SEQ ID NO: 49 and 99 of WO2016065001), AAV5 (SEQ ID NO: 50 and 100 of WO2016065001), or variants or derivatives thereof.

[0095] In one embodiment, the AAV may be a serotype selected from any of those found in Table 1.

[0096] In one embodiment, the AAV may comprise a sequence, fragment or variant thereof, of the sequences in Table 1.

[0097] In one embodiment, the AAV may be encoded by a sequence, fragment or variant as described in Table 1.

TABLE L
AAV Serotypes

| | SEQ | |
|---|---|---|
| | ID | |
| Serotype | NO | Relerenee Inforivalion |
| AAVI | 1 | US20150159173 SEQ ID NO: 11, US20150315612 SEQ ID NO: 202 |
| AAV1 | 2 | US20160017295 SEQ ID NO: Ili S20030138772 SEQ ID NO: 64, US20150159173 |
| | | SEQ ID NO: 27, US2015035612 SEQ ID NO: 219, US7198951 SEQ ID NO: 5 |
| AAV1 | 3 | US20030138772 SEQ ID NO: 6 |
| AAV1.3 | 4 | US20030138772 SEQ ID NO: 14 |
| AAV10 | 5 | US20030138772 SEQ ID NO: 117 |
| AAV10 | 6 | W02015121501 SEQ ID NO: 9 |
| AAV10 | 7 | W02015121501 SEQ ID NO: 8 |
| AAV11 | 8 | US20030138772 SEQ ID NO: 118 |
| AAV12 | 9 | US20030138772 SEQ ID NO: 119 |
| AAV2 | 10 | US2050159173 SEQ ID NO: 7, US20 150315612 SEQ ID NO: 211 |
| AAV2 | 11 | U520030138772 SEQ ID NO: 70, U520150 159173 SEQ ID NO: 23, U52015035612 |
| | | SEQ ID NO: 221, US20160017295 SEQ ID NO: 2, 1356 156303 SEQ ID NO: 4, |
| | | U57198951 SEQ ID NO: 4, W02015121501 SEQ ID NO: 1 |
| AAV2 | 12 | US6156303 SEQ ID NO: 8 |
| AAV2 | 13 | US20030138772 SEQ ID NO: 7 |
| AAV2 | 14 | US6156303 SEQ ID NO: 3 |
| AAV2.5T | 15 | US9233131 SEQ ID NO: 42 |
| AAV223.10 | 16 | US20030138772 SEQ ID NO: 75 |
| AAV223.2 | 17 | US20030138772 SEQ ID NO: 49 |
| AAV223.2 | 18 | US20030138772 SEQ ID NO: 76 |
| AAV223.4 | 19 | US20030138772 SEQ ID NO: 50 |
| AAV223.4 | 20 | US20030138772 SEQ ID NO: 73 |
| AAV223.5 | 21 | US20030138772 SEQ ID NO: 51 |
| AAV223.5 | 22 | US20030138772 SEQ ID NO: 74 |
| AAV223.6 | 23 | US20030138772 SEQ ID NO: 52 |
| AAV22306 | 24 | US20030138772 SEQ ID NO: 78 |
| AAV723.7 | 25 | US20030138772 SEQ ID NO: 53 |
| AAV223.7 | 26 | US20030138772 SEQ ID NO: 77 |
| AAV29.3 | 27 | US20030138772 SEQ ID NO: 82 |
| AAV29,4 | 28 | US20030138772 SEQ ID NO: 12 |
| AAV29.5 | 29 | US20030138772 SEQ ID NO: 83 |
| AAV29.5 | 30 | US20030138772 SEQ ID NO: 13 |
| (AAVbb.2) | | |
| AAV3 | 31 | US20150159173 SEQ ID NO: 12 |
| AAV3 | 32 | US20030138772 SEQ ID NO: 71, US20150591.73 SEQ ID NO: 28, US20160017295 |
| | | SEQ ID NO: :3, US7198951 SEQ ID NO: 6 |
| AAV3 | 33 | US20030138772 SEQ ID NO: 8 |
| AAV3.3b | 34 | US21030138772 SEQ ID NO: 72 |
| AAV3-3 | 35 | US20150315612 SEQ ID NO: 200 |
| AAV3-3 | 36 | US20150315612 SEQ ID NO: 217 |
| AAV3a | 37 | US6156303 SEQ ID NO: 5 |
| AAV3a | 38 | US6156303 SEQ ID NO: 9 |
| AAV3b | 39 | US6156303 SEQ ID NO: 6 |
| AAV3b | 40 | US6156303 SEQ ID NO: 10 |
| AAV3b | 41 | US6156303 SEQ ID NO: 1 |
| AAV4 | 42 | US20140348794 SEQ ID NO: 17 |
| AAV4 | 43 | US20140348794 SEQ ID NO: 5 |
| AAV4 | 44 | US20140348794 SEQ ID NO: 3 |
| AAV4 | 45 | US20140348794 SEQ ID NO: 14 |
| AAV4 | 46 | US20140348794 SEQ ID NO: 15 |
| AAV4 | 47 | US20140348794 SEQ ID NO: 19 |
| AAV4 | 48 | US201140348794 SEQ ID NO: 12 |
| AAV4 | 49 | US20140348794 SEQ ID NO: 13 |
| AAV4 | 50 | US20140348794 SEQ ID NO: 7 |
| AAV4 | Si | US20140348794 SEQ ID NO: 8 |
| AAV4 | 52 | US20140348794 SEQ ID NO: 9 |
| AAV4 | 53 | US20140348794 SEQ ID NO: 2 |
| AAV4 | 54 | US20140348794 SEQ ID NO: 10 |
| AAV4 | 55 | US20140348794 SEQ ID NO: 11 |
| AAV4 | 56 | US201140348794 SEQ ID NO: 18 |
| AAV4 | 57 | US20030138772 SEQ ID NO: 63, US20160017295 SEQ ID NO: 4, US20140348794 |
| | | SEQ ID NO: 4 |
| AAV4 | 58 | US20140348794 SEQ ID NO: 16 |
| AAV4 | 59 | US201140348794 SEQ ID NO: 20 |
| AAV4 | 60 | US20140348794 SEQ ID NO: 6 |
| AAV4 | 61 | US20140348794 SEQ ID NO: 1 |
| AAV42.2 | 62 | US20030138772 SEQ ID NO: 9 |
| AAV42.2 | 63 | US20030138772 SEQ ID NO: 102 |
| AAV42.3b | 64 | US20030138772 SEQ ID NO: 36 |
| AAV42.3B | 65 | US20030138772 SEQ ID NO: 107 |
| AAV42.4 | 66 | US20030138772 SEQ ID NO: 33 |
| AAV42.4 | 67 | US201030138772 SEQ ID NO: 88 |
| AAV42.8 | 68 | US20030138772 SEQ ID NO: 27 |
| AAV42.8 | 69 | US20030138772 SEQ ID NO: 85 |
| AAV43.1 | 70 | US20030138772 SEQ ID NO: 39 |
| AAV43.1 | 71 | US20030138772 SEQ ID NO: 92 |
| AAV43.12 | 72 | US20030138772 SEQ ID NO: 41 |
| AAV43.12 | 73 | US20030138772 SEQ ID NO: 93 |
| AAV43.20 | 74 | US20030138772 SEQ ID NO: 42 |
| AAV43.20 | 75 | US20030138772 SEQ ID NO: 99 |
| AAV43.21 | 76 | US20030138772 SEQ ID NO: 43 |
| AAV43.21 | 77 | US20030138772 SEQ ID NO: 96 |
| AAV43.23 | 78 | US20030138772 SEQ ID NO: 44 |
| AAV43.23 | 79 | US20030138772 SEQ ID NO: 98 |
| AAV43.25 | 80 | US20030138772 SEQ ID NO: 45 |
| AAV43.25 | 81 | US20030138772 SEQ ID NO: 97 |
| AAV43.5 | 82 | US20030138772 SEQ ID NO: 40 |
| AAV43.5 | 83 | US20030138772 SEQ ID NO: 94 |
| AAV4-4 | 84 | US20150315612 SEQ ID NO: 201 |
| AAV4-4 | 85 | US20150315612 SEQ ID NO: 218 |
| AAV44.1 | 86 | US20030138772 SEQ ID NO: 46 |
| AAV44.1 | 87 | US20030138772 SEQ ID NO: 79 |
| AAV44.5 | 88 | US20030138772 SEQ ID NO: 47 |
| AAV44.5 | 89 | US20030138772 SEQ ID NO: 80 |
| AAV4407 | 90 | US20150315612 SEQ ID NO: 90 |
| AAV5 | 91 | US7427396 SEQ ID NO: 1 |
| AAV5 | 92 | US20030138772 SEQ ID NO: 114 |
| AAV5 | 93 | US20160017295 SEQ ID NO: 5, US7427396 SEQ ID NO: 2, US20150315612 SEQ |
| | | ID NO: 216 |
| AAV5 | 94 | US20150315612 SEQ ID NO: 199 |
| AAV6 | 95 | US20150159173 SEQ ID NO: 13 |
| AAV6 | 96 | US0030138772 SEQ ID NO: 65, US20150159173 SEQ ID NO: 29, US520160017295 |
| | | SEQ ID NO: 6, US6156303 SEQ ID NO: 7 |
| AAV6 | 97 | US6156303 SEQ ID NO: 11 |
| AAV6 | 98 | US6156303 SEQ ID NO: 2 |
| AAV6 | 99 | US20150315612 SEQ ID NO: 203 |
| AAV6 | 100 | US20150315612 SEQ ID NO: 220 |
| AAV6.1 | 101 | US20150159173 |
| AAV6.12 | 102 | US20150159173 |
| AAV6.2 | 103 | US20150159173 |
| AAV7 | 104 | US20150159173 SEQ ID NO: 14 |
| AAV7 | 105 | US20150315612 SEQ ID NO: 183 |
| AAV7 | 106 | US20030138772 SEQ ID NO: 2, US20150159173 SEQ ID NO: 30, US20150315612 |
| | | SEQ. ID NO: 181, US20160017295 SEQ ID NO: 7 |
| AAV7 | 107 | US20030138772 SEQ ID NO: 3 |
| AAV7 | 108 | US20030138772 SEQ ID NO: 1, US20150315612 SEQ ID NO: 180 |
| AAV7 | 109 | US20150315612 SEQ ID NO: 213 |
| AAV7 | 110 | US20150315612 SEQ ID NO: 222 |
| AAV8 | 111 | US20150159173 SEQ ID NO: 15 |
| AAV8 | 112 | US20150376240 SEQ ID NO: 7 |
| AAV8 | 113 | US20030138772 SEQ ID NO: 4, US20150315612 SEQ ID NO: 182 |
| AAV8 | 114 | US20030138772 SEQ ID NO: 95, US20140359799 SEQ ID NO: 1, US20150159173 |
| | | SEQ ID NO: 31, US0160017295 SEQ ID NO: 8, US7198951 SEQ ID NO: 7, |
| | | US20150315612 SEQ ID NO: 223 |
| AAV8 | 115 | US20150376240 SEQ ID NO: 8 |
| AAV8 | 116 | US20150315612 SEQ ID NO: 214 |
| AAV-8b | 117 | US20150376240 SEQ ID NO: 5 |
| AAV-8b | 118 | US20150376240 SEQ ID NO: 3 |
| AAV-8h | 119 | US20150376240 SEQ ID NO: 6 |
| AAV-8h | 120 | US20150376240 SEQ ID NO: 4 |
| AAV9 | 121 | US20030138772 SEQ ID NO: 5 |
| AAV9 | 122 | US7198951 SEQ ID NO: 1 |
| AAV9 | 123 | US20160017295 SEQ ID NO: 9 |
| AAV9 | 124 | US20030138772 SEQ ID NO: 100, US7198951 SEQ ID NO. 2 |
| AAV9 | 125 | US7198951 SEQ ID NO: 3 |
| AAV9 | 126 | US7906111 SEQ ID NO: 3; W02015038958 SEQ ID NO: 11 |
| (AAVhu.14) | | |
| AAV9 | 127 | US7906111 SEQ ID NO: 123; W02015038958 SEQ ID NO: 2 |
| (AAVhu.14) | | |
| AAVA3.1 | 128 | US20030138772 SEQ ID NO: 120 |
| AAVA3.3 | 129 | US20030138772 SEQ ID NO: 57 |
| AAVA3.3 | 130 | US20030138772 SEQ ID NO: 66 |
| AAVA3.4 | 131 | US20030138772 SEQ ID NO: 54 |
| AAVA3.4 | 132 | US20030138772 SEQ ID NO: 68 |
| AAVA3.5 | 133 | US201030138772 SEQ ID NO: 55 |
| AAVA3.5 | 134 | US20030138772 SEQ ID NO: 69 |
| AAVA3.7 | 135 | US20030138772 SEQ ID NO: 56 |
| AAVA3.7 | 136 | US20030138772 SEQ ID NO: 67 |
| AAV29.3 | 137 | US20030138772 SEQ ID NO: 11 |
| (AAVbb.1) | | |
| AAVC2 | 138 | US20030138772 SEQ ID NO: 61 |
| AAVC11.5 | 139 | US201150159173 SEQ ID NO: 46, US20150315612 SEQ ID NO: 234 |
| AAVcy.2 | 140 | US20030138772 SEQ ID NO: 15 |
| (AAV 13.3) | | |
| AAV24.1 | 141 | US20030138772 SEQ ID NO: 101 |
| AAVcy.3 | 142 | US201030138772 SEQ ID NO: 16 |
| (AAV24,1) | | |
| AAV27.3 | 143 | US20030138772 SEQ ID NO: 104 |
| AAVey.4 | 144 | US20030138772 SEQ ID NO: 17 |
| (AAV27.3) | | |
| AAVey.5 | 145 | US20150315612 SEQ ID NO: 227 |
| AAV7.2 | 146 | US20030138772 SEQ ID NO: 103 |
| AAVey.5 | 147 | US20030138772 SEQ ID NO: 18 |
| (AAV7.2) | | |
| AAV16.3 | 148 | US20030138772 SEQ ID NO: 105 |
| AAVcy.6 | 149 | US20030138772 SEQ ID NO: 10 |
| (AAV16.3) | | |
| AAVcy.5 | 150 | US20150159173 SEQ ID NO: 8 |
| AAVcy.5 | 151 | US20150159173 SEQ ID NO: 24 |
| AAVCy.5R1 | 152 | US20150159173 |
| AAVCy.5R2 | 153 | US20150159173 |
| AAVCy.51-23 | 154 | US20150159173 |
| AAVCy.5R4 | 155 | US20150159173 |
| AAVDJ | 156 | US20140359799 SEQ ID NO: 3, US7588772 SEQ ID NO: 2 |
| AAVDJ | 157 | US201140359799 SEQ ID NO: 2, US7588772 SEQ ID NO: 1 |
| AAVDJ-8 | 158 | US7588772, Grimm et al 2008 |
| AAVDJ-8 | 159 | US7588772; Grimm et al 2008 |
| AAVF5 | 160 | US20030138772 SEQ ID NO: 110 |
| AAVH2 | 161 | US20030138772 SEQ ID NO: 26 |
| AAVH6 | 162 | US201030138772 SEQ ID NO: 25 |
| AAVIIE1.1 | 163 | US9233131 SEQ ID NO: 44 |
| AAVEIErl.14 | 164 | US9233131 SEQ ID NO: 46 |
| AAVhEr1.16 | 165 | US9233131 SEQ ID NO: 48 |
| AAVhEr1.18 | 166 | US9233131 SEQ ID NO: 49 |
| AAVhEr1.23 | 167 | US9233131 SEQ ID NO: 53 |
| (AAVhEr2.29) | | |
| AAVhEr1.35 | 168 | US9233131 SEQ ID NO: 50 |
| AAVhEr1.36 | 169 | US9233131 SEQ ID NO: 52 |
| AAVITIEr1.5 | 170 | US9233131 SEQ ID NO: 45 |
| AAVhEr1.7 | 171 | US9233131 SEQ ID NO: 51 |
| AAVhErt.8 | 172 | US9233131 SEQ ID NO: 47 |
| AAVhEr2.16 | 173 | US9233131 SEQ ID NO: 55 |
| AAVhEr2.30 | 174 | US9233131 SEQ ID NO: 56 |
| AAVIiEt2.31 | 175 | US9233131 SEQ ID NO: 58 |
| AAVhEr2.36 | 176 | US9233131 SEQ ID NO: 57 |
| AAVhEr2.4 | 177 | US9233131 SEQ ID NO: 54 |
| A AVITIEr3.1 | 178 | US9233131 SEQ ID NO: 59 |
| AAVElu.1 | 179 | US20150315612 SEQ ID NO: 46 |
| A AVhu.1 | 180 | US20150315612 SEQ ID NO: 144 |
| AAVhu.10 | 181 | US20150315612 SEQ ID NO: 56 |
| (AAVI6.8) | | |
| AAVElu.10 | 182 | US20150315612 SEQ ID NO: 156 |
| (AAVI6.8) | | |
| AAVhu.11 | 183 | US20150315612 SEQ ID NO: 57 |
| (AAV16.12) | | |
| AAVhu.11 | 184 | US20150315612 SEQ ID NO: 153 |
| (AAV16.12) | | |
| AAVhu.12 | 185 | US20150315612 SEQ ID NO: 59 |
| AAVhu.12 | 186 | US20150315612 SEQ ID NO: 154 |
| AAVhu.13 | 187 | US20150159173 SEQ ID NO: 16, US20150315612 SEQ ID NO: 71 |
| AAVhu.13 | 188 | US20150159173 SEQ ID NO: 32, US20150315612 SEQ ID NO: 129 |
| AAVhu.136.1 | 189 | US201150315612 SEQ ID NO: 165 |
| AVhu.140.1 | 190 | US20150315612 SEQ ID NO: 166 |
| AAVhu.140.2 | 191 | US20150315612 SEQ ID NO: 167 |
| AAVIllt.145.6 | 192 | US20150315612 SEQ ID No: 178 |
| AAVhu.15 | 193 | US20150315612 SEQ ID NO: 147 |
| AAVhu.15 | 194 | US20150315612 SEQ ID NO: 50 |
| (AAV33.4) | | |
| AAVhu.156.1 | 195 | US20150315612 SEQ ID No: 179 |
| AAVIllt.16 | 196 | US20150315612 SEQ ID NO: 148 |
| AAVhu.16 | 197 | US201150315612 SEQ ID NO: 51 |
| (AAV33.8) | | |
| AAVhu.17 | 198 | US20150315612 SEQ ID NO: 83 |
| AAVhu.17 | 199 | US20150315612 SEQ ID NO: 4 |
| (AAV33.12) | | |
| AAVhu.172.1 | 200 | US20150315612 SEQ ID NO: 171 |
| AAVIRL172.2 | 201 | US20150315612 SEQ ID NO: 172 |
| AAVhu.173.4 | 202 | US20150315612 SEQ ID NO: 173 |
| AAVhu.173.8 | 203 | US20150315612 SEQ ID NO: 175 |
| AAVhu.18 | 204 | US20150315612 SEQ ID NO: 52 |
| AAVhu.18 | 205 | US20150315612 SEQ ID NO: 149 |
| AAVIlu.19 | 206 | US20150315612 SEQ ID NO: 62 |
| AAVhu.19 | 207 | US20150315612 SEQ ID NO: 133 |
| AAVhu.2 | 208 | US20150315612 SEQ ID NO: 48 |
| AAVhu.2 | 209 | US20150315612 SEQ ID NO: 143 |
| AAVhu.20 | 210 | US20150315612 SEQ ID NO: 63 |
| AAVIlu.20 | 211 | US20150315612 SEQ ID NO: 134 |
| AAVhu.21 | 212 | US20150315612 SEQ ID NO: 65 |
| AAVIRL21 | 213 | US20150315612 SEQ ID NO: 135 |
| AAVhu.22 | 214 | US20150315612 SEQ ID NO: 67 |
| AAVhu.22 | 215 | US20150315612 SEQ ID NO: 138 |
| AAVhu.23 | 216 | US20150315612 SEQ ID NO: 60 |
| AAVhu.23.2 | 217 | US20150315612 SEQ ID NO: 137 |
| AAVhu.24 | 218 | US20150315612 SEQ ID NO: 66 |
| AAVIlu.24 | 219 | US20150315612 SEQ ID NO: 136 |
| AAVhu.25 | 220 | US20150315612 SEQ ID NO: 49 |
| AAVIRL25 | 221 | US20150315612 SEQ ID NO: 146 |
| AAVhu.26 | 222 | US20150159173 SEQ ID NO: 17, US20150315612 SEQ ID NO: 61 |
| AAVhu.26 | 223 | US20150159173 SEQ ID NO: 33, US0150315612 SEQ ID NO: 139 |
| AAVIlu.27 | 224 | US20150315612 SEQ ID NO: 64 |
| AAVhu.27 | 225 | US20150315612 SEQ ID NO: 140 |
| AAVIRL28 | 226 | US20150315612 SEQ ID NO: 68 |
| AAVhu.28 | 227 | US20150315612 SEQ ID NO: 130 |
| AAVhu.29 | 228 | US20150315612 SEQ ID NO: 69 |
| AAVhu.29 | 229 | US20150159173 SEQ ID NO: 42, US0150315612 SEQ ID NO: 132 |
| AAVhu.29 | 230 | US20150315612 SEQ ID NO: 225 |
| AAVhu.29R | 231 | US20150159173 |
| AAVIlu.3 | 232 | US20150315612 SEQ ID NO: 44 |
| AAVhu.3 | 233 | US20150315612 SEQ ID NO: 145 |
| AAVhu.30 | 234 | US20150315612 SEQ ID NO: 70 |
| AAVhu.30 | 235 | US20150315612 SEQ ID NO: 131 |
| AAVhu.31 | 236 | US20150315612 SEQ ID NO: 1 |
| AAVIlu.31 | 237 | US20150315612 SEQ ID NO: 121 |
| AAVhu.32 | 238 | US20150315612 SEQ ID NO: 2 |
| AAVIRL32 | 239 | US20150315612 SEQ ID NO: 122 |
| AAVhu.33 | 240 | US20150315612 SEQ ID NO: 75 |
| AAVhu.33 | 241 | US20150315612 SEQ ID NO: 124 |
| AAVhu.34 | 242 | US20150315612 SEQ ID NO: 72 |
| AAVhu.34 | 243 | US20150315612 SEQ ID NO: 125 |
| AAVhu.35 | 244 | US20150315612 SEQ ID NO: 73 |
| AAVhu.35 | 245 | US20150315612 SEQ ID NO: 164 |
| AAVIlu.36 | 246 | US20150315612 SEQ ID NO: 74 |
| AAVhu.36 | 247 | US0150315612 SEQ ID NO: 126 |
| AAVIRI.37 | 248 | US20150159173 SEQ ID NO: 34, US20150315612 SEQ ID NO: 88 |
| AAVhu.37 | 249 | US20150315612 SEQ ID NO: 10, US20150159173 SEQ ID NO: 18 |
| (AAV106. I) | | |
| AAVhu.38 | 250 | US0150315612 SEQ ID NO: 161 |
| AAVIRI.39 | 251 | US20150315612 SEQ ID NO: 102 |
| AAVhu.39 | 252 | US20150315612 SEQ ID NO: 24 |
| (AAVI,G-9) | | |
| AAVhu.4 | 253 | US0150315612 SEQ ID NO: 47 |
| AAVhu.4 | 254 | US20150315612 SEQ ID NO: 141 |
| AAVhu.40 | 255 | US20150315612 SEQ ID NO: 87 |
| AAVhu.40 | 256 | US20150315612 SEQ ID No: 11 |
| (AAVIA 4.3) | | |
| AAVhu.41 | 257 | US20150315612 SEQ ID NO: 91 |
| AAVhu.41 | 258 | US20150315612 SEQ ID NO: 6 |
| (AAV 1272) | | |
| AAVhu.42 | 259 | US20150315612 SEQ ID NO: 85 |
| AAVhu.42 | 260 | US20150315612 SEQ ID NO: 8 |
| (AAV127.5) | | |
| AAVhu.43 | 261 | US20150315612 SEQ ID NO: 160 |
| AAVhu.43 | 262 | US20150315612 SEQ ID NO: 236 |
| AAVhu.43 | 263 | US20150315612 SEQ ID NO: 80 |
| (AAV128.1) | | |
| AAVhu.44 | 264 | US20150159173 SEQ ID NO: 45, US20150315612 SEQ ID NO: 158 |
| AAVhu.44 | 265 | US20150315612 SEQ ID NO: 81 |
| (AAV128.3) | | |
| AAVhu.44R1 | 266 | US20150159173 |
| AAVhu.44R2 | 267 | US20150159173 |
| AAVhu.44R3 | 268 | 11520150159173 |
| AAVEhu.45 | 269 | US20150315612 SEQ ID NO: 76 |
| AAVhu.45 | 270 | US201503 15612 SEQ ID NO: 127 |
| AAVhu.46 | 271 | US20150315612 SEQ ID NO: 82 |
| AAVIRI.46 | 272 | US20150315612 SEQ ID NO: 159 |
| AAVIhu.46 | 273 | US20150315612 SEQ ID NO: 224 |
| AAVEhu.47 | 274 | US20150315612 SEQ ID NO: 77 |
| AAVhu.47 | 275 | US20150315612 SEQ ID NO: 128 |
| AAVhu.48 | 276 | US20150159173 SEQ ID NO: 38 |
| AAVhu.48 | 277 | US20150315612 SEQ ID NO: 157 |
| AAVIhu.48 | 278 | US20150315612 SEQ ID NO: 78 |
| (AAV130.4) | | |
| AAVhu.48R1 | 279 | US20150159173 |
| AAVhu.48R2 | 280 | US20150159173 |
| AAVIlu.48R3 | 281 | US20150159173 |
| AAVhu.49 | 282 | US20150315612 SEQ ID NO: 209 |
| AAVhu.49 | 283 | US20150315612 SEQ ID NO: 189 |
| AAVhu.5 | 284 | US20150315612 SEQ ID NO: 45 |
| AAV1hu.5 | 285 | US20150315612 SEQ ID NO: 142 |
| AAVhu.51 | 286 | US20150315612 SEQ ID NO: 208 |
| AAVhu.51 | 287 | US20150315612 SEQ ID NO: 190 |
| AAVhu.52 | 288 | US20150315612 SEQ ID NO: 210 |
| AAVhu.52 | 289 | US20150315612 SEQ ID NO: 191 |
| AAVhu.53 | 290 | US20150159173 SEQ ID NO: 19 |
| AAVhu.53 | 291 | US20150159173 SEQ ID NO: 35 |
| AAVhu.53 | 292 | US20150315612 SEQ ID NO: 176 |
| (AAVI45.1) | | |
| AAVhu.54 | 293 | US20150315612 SEQ ID NO: 188 |
| AAVhu.54 | 294 | US20150315612 SEQ ID No: 177 |
| (AAV145.5) | | |
| AAVhu.55 | 295 | US20150315612 SEQ ID NO: 187 |
| AAVhu.56 | 296 | US20150315612 SEQ ID NO: 205 |
| AAVhu.56 | 297 | US20150315612 SEQ ID NO: 168 |
| (AAV145.6) | | |
| AAVhu.56 | 298 | US20150315612 SEQ ID NO: 192 |
| (AAV 1456) | | |
| AAVhu.57 | 299 | US20150315612 SEQ ID NO: 206 |
| AAV1iu.57 | 300 | US20150315612 SEQ ID NO: 169 |
| A AVhu.57 | 301 | US20150315612 SEQ ID NO: 193 |
| AAVhu.58 | 302 | US20150315612 SEQ ID NO: 207 |
| AAVhu.58 | 303 | US20150315612 SEQ ID NO: 194 |
| AAVhu.6 | 304 | US20150315612 SEQ ID NO: 5 |
| (AAV3.1) | | |
| AAVhu.6 | 305 | US20150315612 SEQ ID NO: 84 |
| (AAV3.1) | | |
| AAV1iu.60 | 306 | US20150315612 SEQ ID NO: 184 |
| AAVhu.60 | 307 | US20150315612 SEQ ID NO: 170 |
| (AAV161.10) | | |
| AAVhu.61 | 308 | US20150315612 SEQ ID NO: 185 |
| AAVhu.61 | 309 | US20150315612 SEQ ID NO: 174 |
| (AAVI61.6) | | |
| AAVhu.63 | 310 | US20150315612 SEQ ID NO: 204 |
| AAVhu.63 | 311 | US20150315612 SEQ ID NO: 195 |
| AAVhu.64 | 312 | US20150315612 SEQ ID NO: 212 |
| AAVhu.64 | 313 | US20150315612 SEQ ID NO: 196 |
| AAVhu.66 | 314 | US20150315612 SEQ ID NO: 197 |
| AAVhu.67 | 315 | US2(1150315612 SEQ ID NO: 215 |
| AAVhu.67 | 316 | US20150315612 SEQ ID NO: 198 |
| AAVhu.7 | 317 | US20150315612 SEQ ID NO: 226 |
| AAVhu.7 | 318 | US20150315612 SEQ ID NO: 150 |
| AAVhu.7 | 319 | US20150315612 SEQ ID NO: 55 |
| (AAV7.3) | | |
| AAVhu.71 | 320 | US20150315612 SEQ ID NO: 79 |
| AAVEhu,8 | 321 | US20150315612 SEQ ID NO: 53 |
| AAVhu.8 | 322 | US20150315612 SEQ ID NO: 12 |
| AAVInt.8 | 323 | US20150315612 SEQ ID NO: 151 |
| AA:Vhu.9 | 324 | US20150315612 SEQ ID NO: 58 |
| (AAV3.1.) | | |
| AAVhu.9 | 325 | US20150315612 SEQ ID NO: 155 |
| (AANT3.1) | | |
| AAV-LK01 | 326 | US20150376607 SEQ ID NO: 2 |
| AAV-LK01 | 327 | US20150376607 SEQ ID NO: 29 |
| AAV-1K02 | 328 | US20150376607 SEQ ID NO: 3 |
| AAV-1K02 | 329 | US20150376607 SEQ ID NO: 30 |
| AAV-LK03 | 330 | US20150376607 SEQ ID NO: 4 |
| AAV-LKO3 | 331 | W02015121501 SEQ ID NO: 12, US20150376607 SEQ ID NO: 31 |
| AAV-LKO4 | 332 | US20150376607 SEQ ID NO: 5 |
| AAV-LKO4 | 333 | US20150376607 SEQ ID NO: 32 |
| AAV-LK05 | 334 | US20150376607 SEQ ID NO: 6 |
| AAV-LK05 | 335 | US20150376607 SEQ ID NO: 33 |
| AAV-LK06 | 336 | US20150376607 SEQ ID NO: 7 |
| AAV-LKO6 | 337 | US20150376607 SEQ ID NO: 34 |
| AAV-LK07 | 338 | US20150376607 SEQ ID NO: 8 |
| AAV-LK07 | 339 | US20150376607 SEQ ID NO: 35 |
| AAV-LK08 | 340 | US20150376607 SEQ ID NO: 9 |
| AAV-LK08 | 341 | US20150376607 SEQ ID NO: 36 |
| AAV-LK09 | 342 | US20150376607 SEQ ID NO: 10 |
| AAV-LK09 | 343 | US201.50376607 SEQ ID NO: 37 |
| AAV-LK10 | 344 | US20150376607 SEQ ID NO: 11 |
| AAV-LK10 | 345 | US20150376607 SEQ ID NO: 38 |
| AAV-LK11 | 346 | US20150376607 SEQ ID NO: 12 |
| AAV-LK11 | 347 | US20150376607 SEQ ID NO: 39 |
| AAV-LK12 | 348 | US20150376607 SEQ ID NO: 13 |
| AAV-LK12 | 349 | US20150376607 SEQ ID NO: 40 |
| AAV-LK13 | 350 | US20150376607 SEQ ID NO: 14 |
| AAV-LK13 | 351 | US20150376607 SEQ ID NO: 41 |
| AAV-LK14 | 352 | US20150376607 SEQ ID NO: 15 |
| AAV-LK14 | 353 | US20150376607 SEQ ID NO: 42 |
| AAV-LK15 | 354 | US20150376607 SEQ ID NO: 16 |
| AAV-LK15 | 355 | US20150376607 SEQ ID NO: 43 |
| AAV-LK16 | 356 | US201.50376607 SEQ ID NO: 17 |
| AAV-LK16 | 357 | US20150376607 SEQ ID NO: 44 |
| AAV-LK17 | 358 | US20150376607 SEQ ID NO: 18 |
| AAV-LK17 | 359 | US20150376607 SEQ ID NO: 45 |
| AAV-LK18 | 360 | US20150376607 SEQ ID NO: 19 |
| AAV-LK18 | 361 | US20150376607 SEQ ID NO: 46 |
| AAV-LK19 | 362 | US20150376607 SEQ ID NO: 20 |
| AAV-LK19 | 363 | US20150376607 SEQ ID NO: 47 |
| AAV-PAEC | 364 | US20150376607 SEQ ID NO: 1 |
| AAV-PAEC | 365 | US20150376607 SEQ ID NO: 48 |
| AAV- | 366 | US20150376607 SEQ ID NO: 26 |
| PAEC11 | | |
| AAV- | 367 | US20150376607 SEQ ID NO: 54 |
| PAEC11 | | |
| AAV- | 368 | US20150376607 SEQ ID N0: 27 |
| PAEC12 | | |
| AAV- | 369 | US20150376607 SEQ ID NO: Si |
| PAEC12 | | |
| AAV- | 370 | US20150376607 SEQ ID NO: 28 |
| PAEC13 | | |
| AAV- | 371 | US20150376607 SEQ ID NO: 49 |
| PAEC13 | | |
| AAV-PAEC2 | 372 | US20150376607 SEQ ID NO: 21 |
| AAV-PAEC2 | 373 | US20150376607 SEQ ID NO: 56 |
| AAV-PAEC4 | 374 | US20150376607 SEQ ID NO: 22 |
| AAV-PAEC4 | 375 | US20150376607 SEQ ID NO: 55 |
| AAV-PAEC6 | 376 | US20150376607 SEQ ID NO: 23 |
| AAV-PAEC6 | 377 | US20150376607 SEQ ID NO: 52 |
| AAV-PAEC7 | 378 | US20450376607 SEQ ID NO: 24 |
| AAV-PA1X7 | 379 | US20150376607 SEQ ID NO: 53 |
| AAV-PAEC8 | 380 | US20150376607 SEQ ID NO: 25 |
| AAV-PAEC8 | 381 | US20150376607 SEQ ID NO: 50 |
| AAVpi.1 | 382 | US20150315612 SEQ ID NO: 28 |
| AAVp1.1 | 383 | US20150315612 SEQ ID NO: 93 |
| AAVpi.2 | 384 | US20150315612 SEQ ID NO: 30 |
| AAVpi.2 | 385 | US20150315612 SEQ ID NO: 95 |
| AAVpi.3 | 386 | US20150315612 SEQ ID NO: 29 |
| AAVpi.3 | 387 | US20150315612 SEQ ID NO: 94 |
| AAVrh.10 | 388 | US20150159173 SEQ ID NO: 9 |
| AAVrh.10 | 389 | US20150159173 SEQ ID NO: 25 |
| AAV44.2 | 390 | US20030138772 SEQ ID NO: 59 |
| AAVrh.10 | 391 | US20030138772 SEQ ID NO: 81 |
| (AAV44.2) | | |
| AAV42.IB | 392 | US20030138772 SEQ ID NO: 90 |
| AAVrh.12 | 393 | US20030138772 SEQ ID NO: 30 |
| (AAV42.1b) | | |
| AAVrh.13 | 394 | US201501.591.73 SEQ ID NO: 10 |
| AAVrh.13 | 395 | US20150159173 SEQ ID NO: 26 |
| AAVrh.13 | 396 | US20150315612 SEQ ID NO: 228 |
| AAVrh.13R | 397 | US20150159173 |
| AAV42.3A | 398 | US20030138772 SEQ ID NO: 87 |
| AAVrh.14 | 399 | US20030138772 SEQ ID NO: 32 |
| (AAV42.3a) | | |
| AAV42.5A | 400 | US201030138772 SEQ ID NO: 89 |
| AAVrh.17 | 401 | US20030138772 SEQ ID NO: 34 |
| (AAV42.5a) | | |
| AAV42.5B | 402 | US20030138772 SEQ ID NO: 91 |
| AAVr11.18 | 403 | US20030138772 SEQ ID NO: 29 |
| (AAV42.5b) | | |
| AAV42.6B | 404 | US20030138772 SEQ ID NO: 112 |
| AAVr11.19 | 405 | US20030138772 SEQ ID NO: 38 |
| (AAV42.6b) | | |
| AAVrh.2 | 406 | US20150159173 SEQ ID NO: 39 |
| AAVrh.2 | 407 | US201150315612 SEQ ID NO: 231 |
| AAVrh.20 | 408 | US20150159173 SEQ ID NO: 1 |
| AAV42.10 | 409 | US20030138772 SEQ ID NO: 106 |
| AAVrh.21 | 410 | US20030138772 SEQ ID NO: 35 |
| (AAV42.10) | | |
| AAV42.11 | 411 | US20030138772 SEQ ID NO: 108 |
| AAVrh.22 | 412 | US20030138772 SEQ ID NO: 37 |
| (AAV42.10) | | |
| AAV42.12 | 413 | US201030138772 SEQ ID NO: 113 |
| AAVrh.23 | 414 | US20030138772 SEQ ID NO: 58 |
| (AAV42.12) | | |
| AAV42.13 | 415 | US20030138772 SEQ ID NO: 86 |
| AAVrh.24 | 416 | US20030138772 SEQ ID NO: 31 |
| (AAV42.13) | | |
| AAV42.15 | 417 | US20030138772 SEQ ID NO: 84 |
| AAVr11.25 | 418 | US20030138772 SEQ ID NO: 28 |
| (AAV42.15) | | |
| AAVrh.2R | 419 | US20150159173 |
| AAVrh.31 | 420 | US20030138772 SEQ ID NO: 48 |
| (AAV223.1) | | |
| AAVC1 | 421 | US20030138772 SEQ ID NO: 60 |
| AAVrh.32 | 422 | US20030138772 SEQ ID NO: 19 |
| (AAVC1) | | |
| AAVrh.32/33 | 423 | US20150159173 SEQ ID NO: 2 |
| AAVrh.33 | 424 | US20030138772 SEQ ID NO: 20 |
| (AAVC3) | | |
| AAVC5 | 425 | US20030138772 SEQ ID NO: 62 |
| AAVr11.34 | 426 | US20030138772 SEQ ID NO: 21 |
| (AAVC5) | | |
| AAVF1 | 427 | US201030138772 SEQ ID NO: 109 |
| AAVrh.35 | 428 | US20030138772 SEQ ID NO: 22 |
| (AAVF1) | | |
| AANT3 | 429 | US20030138772 SEQ ID NO: 111 |
| AAVrh.36 | 430 | US201030138772 SEQ ID NO: 23 |
| (AAVI-73) | | |
| AAVrh.37 | 431 | US20030138772 SEQ ID NO: 24 |
| AAVH1.37 | 432 | US20150159173 SEQ ID NO: 40 |
| AAVrh.37 | 433 | US20150315612 SEQ ID NO: 229 |
| AAVr13.37R2 | 434 | US20150159173 |
| AAVrh.38 | 435 | US20150315612 SEQ ID NO: 7 |
| (AAVI-G-4) | | |
| AAVr11.38 | 436 | US20150315612 SEQ ID NO: 86 |
| (AAVLG-4) | | |
| AAVrh.39 | 437 | US20450159173 SEQ ID NO: 20, US20150345612 SEQ ID NO: 13 |
| AAVrh.39 | 438 | US20150159173 SEQ ID NO: 3, US20150159173 SEQ ID NO: 36, US20150315612 |
| | | SEQ ID NO: 89 |
| AAVrh.40 | 439 | US20150315612 SEQ ID NO: 92 |
| AAVrh.40 | 440 | US20150315612 SEQ ID No: 14 |
| (AAVLG-10) | | |
| A AVrh.43 | 441 | US20150315612 SEQ ID NO: 43, US20150159173 SEQ ID NO: 21 |
| (AAVN721- | | |
| 8) | | |
| AAVrh.43 | 442 | US20150315612 SEQ ID NO: 163, US20150159173 SEQ ID NO: 37 |
| (AAVN721- | | |
| 8) | | |
| AAVrh.44 | 443 | US20150315612 SEQ ID NO: 34 |
| AAVrh.44 | 444 | US20150315612 SEQ ID NO: 111 |
| AAVrh.45 | 445 | US20150315612 SEQ ID NO: 41 |
| AAVrh.45 | 446 | US20150315612 SEQ ID NO: 109 |
| AAVrh.46 | 447 | US20150159173 SEQ ID NO: 22, US20150315612 SEQ ID NO: 19 |
| AAVrh.46 | 448 | US20150159173 SEQ ID NO: 4, US20150315612 SEQ ID NO: 101 |
| AAVrh.47 | 449 | US20150315612 SEQ ID NO: 38 |
| AAVrh.47 | 450 | US20150315612 SEQ ID NO: 118 |
| AAVrh.48 | 451 | US201501591.73 SEQ ID NO: 44, US20150315612 SEQ ID NO: 115 |
| AAVrh.48.1 | 452 | US20150159173 |
| AAVrh.48.1.2 | 453 | US20150159173 |
| AAVrh.48.2 | 454 | US20150159173 |
| AAVrh.48 | 455 | US20150315612 SEQ ID NO: 32 |
| (AAV1-7) | | |
| AAVrh.49 | 456 | US201503 15612 SEQ ID NO: 25 |
| (AAV1-8) | | |
| AAVrh.49 | 457 | US20150315612 SEQ ID NO: 103 |
| (AAV1-8) | | |
| AAVrh.50 | 458 | US20150315612 SEQ ID NO: 23 |
| (AAV2-4) | | |
| AAVrh.50 | 459 | US20150315612 SEQ ID NO: 108 |
| (AAV2-4) | | |
| AAVrh.51 | 460 | US20150315612 SEQ ID No: 22 |
| (AAV2-5) | | |
| AAVrh.51 | 461 | VS20150315612 SEQ ID NO: 104 |
| (AAV2-5) | | |
| AAVrh.52 | 462 | US20150315612 SEQ ID NO: 18 |
| (AAV3-9) | | |
| AAVrh.52 | 463 | US20150315612 SEQ ID NO: 96 |
| (AAV3-9) | | |
| AAVrh.53 | 464 | US20150315612 SEQ ID NO: 97 |
| AAVrh.53 | 465 | US201503 15612 SEQ ID NO: 17 |
| (AAV3-11) | | |
| AAVrh.53 | 466 | US20150315612 SEQ ID NO: 186 |
| (AAV3-11) | | |
| AAVrh.54 | 467 | US20150315612 SEQ ID NO: 40 |
| AAVrh.54 | 468 | US20150159173 SEQ ID NO: 49, US20150315612 SEQ ID NO: 116 |
| AAVrh.55 | 469 | US20150315612 SEQ ID NO: 37 |
| AAVrh.55 | 470 | US20150315612 SEQ ID NO: 117 |
| (AAV4-19) | | |
| AAVrh.56 | 471 | US20150315612 SEQ ID NO: 54 |
| AAVrh.56 | 472 | US20150315612 SEQ ID NO: 152 |
| AAVrh.57 | 473 | US20150315612 SEQ ID NO: 26 |
| AAVrh.57 | 474 | US20150315612 SEQ ID NO: 105 |
| AAVrh.58 | 475 | US20150315612 SEQ ID NO: 27 |
| AAVrh.58 | 476 | US20150159173 SEQ ID NO: 48, US20150315612 SEQ ID NO: 106 |
| AAVrh.58 | 477 | US201503 15612 SEQ ID NO: 232 |
| AAVrh.59 | 478 | US20150315612 SEQ ID NO: 42 |
| AAVrh.59 | 479 | US20150315612 SEQ ID NO: 110 |
| AAVrh.60 | 480 | US20150315612 SEQ ID NO: 31 |
| AAVrh.60 | 481 | US20150315612 SEQ ID NO: 120 |
| AAVrh.61 | 482 | US20150315612 SEQ ID NO: 107 |
| AAVrh.61 | 483 | US520150315612 SEQ ID NO: 21 |
| (AAV2-3) | | |
| AAVrh.62 | 484 | US20150315612 SEQ ID No: 33 |
| (AAV2-15) | | |
| AAVrh.62 | 485 | US20150315612 SEQ ID NO: 114 |
| (AAV2-15) | | |
| AAVrh.64 | 486 | US20150315612 SEQ ID No: 15 |
| AAVrh.64 | 487 | US20150159173 SEQ ID NO: 43, US20150315612 SEQ ID NO: 99 |
| AAVrh.64 | 488 | US20150315612 SEQ ID NO: 233 |
| AAVRh.64R | 489 | US20150159173 |
| 1 | | |
| AAVRh.64R | 490 | US20150159173 |
| 2 | | |
| AAVrh.65 | 491 | US20150315612 SEQ ID NO: 35 |
| AAVrh.65 | 492 | US20150315612 SEQ ID NO: 112 |
| AAVrh.67 | 493 | US20150315612 SEQ ID NO: 36 |
| AAVrh.67 | 494 | US20150315612 SEQ ID NO: 230 |
| AAArh.67 | 495 | US20150159173 SEQ ID NO: 47, US20150315612 SEQ ID NO: 113 |
| AAVrh.68 | 496 | US20150315612 SEQ ID NO: 16 |
| AAVrh.68 | 497 | US20150315612 SEQ ID NO: 100 |
| AAVrh.69 | 498 | US20150315612 SEQ ID NO: 39 |
| AAVrh.69 | 499 | US20150315612 SEQ ID NO: 119 |
| AAVrh.70 | 500 | US20150315612 SEQ ID NO: 20 |
| AAVrh.70 | 501 | US20150315612 SEQ ID NO: 98 |
| AAVrh.71 | 502 | US20150315612 SEQ ID NO: 162 |
| AAVrh.72 | 503 | US20150315612 SEQ ID NO: 9 |
| AAVrh.73 | 504 | US20150159173 SEQ ID NO: 5 |
| AAVrh.74 | 505 | US20150159173 SEQ ID NO: 6 |
| AAVrh.8 | 506 | US20150159173 SEQ ID NO: 41 |
| AAVrh.8 | 507 | US20150315612 SEQ ID NO: 235 |
| AAVrh.8R | 508 | US20150159173, WO2015168666 SEQ ID NO: 9 |
| AAVrh.8R | 509 | WO2015168666 SEQ ID NO: 10 |
| A586R | | |
| mutant | | |
| AAVrh.8R | 510 | WO2015168666 SEQ ID NO: 11 |
| R533A | | |
| mulam | | |
| BAAV | 511 | US9193769 SEQ ID NO: 8 |
| (bovine | | |
| AAV) | | |
| BAAV | 512 | US9193769 SEQ ID NO: 10 |
| (bovine | | |
| AAV) | | |
| BAAV | 513 | US9193769 SEQ ID NO: 4 |
| (bovine | | |
| AAV) | | |
| BAAV | 514 | US9193769 SEQ ID NO: 2 |
| (bovine | | |
| AAV) | | |
| BAAV | 515 | US9193769 SEQ ID NO: 6 |
| (bovine | | |
| AAV) | | |
| BAAV | 516 | US9193769 SEQ ID NO: 1 |
| (bovine | | |
| AAV) | | |
| BAAV | 517 | US9193769 SEQ ID NO: 5 |
| (bovine | | |
| AAV) | | |
| BAAV | 518 | US9193769 SEQ ID NO: 3 |
| (bovine | | |
| AAV) | | |
| BAAV | 519 | US9193769 SEQ ID NO: 11 |
| (bovine | | |
| AAV) | | |
| BAAV | 520 | US7427396 SEQ ID NO: 5 |
| (bovine | | |
| AAV) | | |
| BAAV | 521 | US7427396 SEQ ID NO: 6 |
| (bovine | | |
| AAV) | | |
| BAAV | 522 | US9193769 SEQ ID NO: 7 |
| (bovine | | |
| AAV) | | |
| BAAV | 523 | US9193769 SEQ ID NO: 9 |
| (bovine | | |
| AAV) | | |
| BNP61 AAV | 524 | US20150238550 SEQ ID NO: 1 |
| BNP61 AAV | 525 | US20150238550 SEQ ID NO: 2 |
| BNP62 AAV | 526 | US20150238550 SEQ ID NO: 3 |
| BNP63 AAV | 527 | US20150238550 SEQ ID NO: 4 |
| caprine AAV | 528 | US7427396 SEQ ID NO: 3 |
| caprine AAV | 529 | US7427396 SEQ ID NO: 4 |
| true type | 530 | WO2015121501 SEQ ID NO: 2 |
| AAV | | |
| (ttAAV) | | |
| AAAV | 531 | US9238800 SEQ ID NO: 12 |
| (Avian AAV) | | |
| AAAV | 532 | US9238800 SEQ ID NO: 2 |
| (Avian AAV) | | |
| AAAV | 533 | US9238800 SEQ ID NO: 6 |
| (Avian AAV) | | |
| AAAV | 534 | US9238800 SEQ ID NO: 4 |
| (Avian AAV) | | |
| AAAV | 535 | US9238800 SEQ ID NO: 8 |
| (Avian AAV) | | |
| AAAV | 536 | US9238800 SEQ ID NO: 14 |
| (Avian AAV) | | |
| AAAV | 537 | US9238800 SEQ ID NO: 10 |
| (Avian AAV) | | |
| AAAV | 538 | US9238800 SEQ ID NO: 15 |
| (Avian AAV) | | |
| AAAV | 539 | US9238800 SEQ ID NO: 5 |
| (Avian AAV) | | |
| AAAV | 540 | US9238800 SEQ ID NO: 9 |
| (Avian AAV) | | |
| AAAV | 541 | US9238800 SEQ ID NO: 3 |
| (Avian AAV) | | |
| AAAV | 542 | US9238800 SEQ ID NO: 7 |
| (Avian AAV) | | |
| AAAV | 543 | US9238800 SEQ ID NO: 11 |
| (Avian AAV) | | |
| AAAV | 544 | US9238800 SEQ ID NO: 13 |
| (Avian AAV) | | |
| AAAV | 545 | US9238800 SEQ ID NO: 1 |
| (Avian AAV) | | |
| AAV Shuffle | 546 | US20160017295 SEQ ID NO: 23 |
| 1004 | | |
| AAV Shuffle | 547 | US20160017295 SEQ ID NO: 11 |
| 1004 | | |
| AAV Shuffle | 548 | US20160017295 SEQ ID NO: 37 |
| 100-2 | | |
| AAV Shuffle | 549 | US20160017295 SEQ ID NO: 29 |
| 100-2 | | |
| AAV Shuffle | 550 | US20160017295 SEQ ID NO: 24 |
| 100-3 | | |
| AAV Shuffle | 551 | US20160017295 SEQ ID NO: 12 |
| 100-3 | | |
| AAV Shuffle | 552 | US20160017295 SEQ ID NO: 25 |
| 100-7 | | |
| AAV Shuffle | 553 | US20160017295 SEQ ID NO: 13 |
| 100-7 | | |
| AAV Shuffle | 554 | US20160017295 SEQ ID NO: 34 |
| 10-2 | | |
| AAV Shuffle | 555 | US20160017295 SEQ ID NO: 26 |
| 10-2 | | |
| AAV Shuffle | 556 | US20160017295 SEQ ID NO: 35 |
| 10-6 | | |
| AAV Shuffle | 557 | US20160017295 SEQ ID NO: 27 |
| 10-6 | | |
| AAV Shuffle | 558 | US20160017295 SEQ ID NO: 36 |
| 10-8 | | |
| AAV Shuffle | 559 | US20160017295 SEQ ID NO: 28 |
| 10-8 | | |
| AAV SM | 560 | US20160017295 SEQ ID NO: 41 |
| 100-10 | | |
| AAV SM | 561 | US20160017295 SEQ ID NO: 33 |
| 100-10 | | |
| AAV SM | 562 | US20160017295 SEQ ID NO: 40 |
| 100-3 | | |
| AAV SM | 563 | US20160017295 SEQ ID NO: 32 |
| 100-3 | | |
| AAV SM 10- | 564 | US20160017295 SEQ ID NO: 38 |
| 1 | | |
| AAV SM 10- | 565 | US20160017295 SEQ ID NO: 30 |
| 1 | | |
| AAV SM 10- | 566 | US20160017295 SEQ ID NO: 10 |
| 2 | | |
| AAV SM 10- | 567 | US20160017295 SEQ ID NO: 22 |
| 2 | | |
| AAV SM 10- | 568 | US20160017295 SEQ ID NO: 39 |
| 8 | | |
| AAV SM 10- | 569 | US20160017295 SEQ ID NO: 31 |
| 8 | | |
| AAV SM | 560 | US20160017295 SEQ ID NO: 41 |
| 100-10 | | |
| AAV SM | 561 | US20160017295 SEQ ID NO: 33 |
| 100-10 | | |
| AAV SM | 562 | US20160017295 SEQ ID NO: 40 |
| 100-3 | | |
| AAV SM | 563 | US20160017295 SEQ ID NO: 32 |
| 100-3 | | |
| AAV SM 10- | 564 | US20160017295 SEQ ID NO: 38 |
| 1 | | |
| AAV SM 10- | 565 | US20160017295 SEQ ID NO: 30 |
| 1 | | |
| AAV SM 10- | 566 | US20160017295 SEQ ID NO: 10 |
| 2 | | |
| AAV SM 10- | 567 | US20160017295 SEQ ID NO: 22 |
| 2 | | |
| AAV SM 10- | 568 | US20160017295 SEQ ID NO: 39 |
| 8 | | |
| AAV SM 10- | 569 | US20160017295 SEQ ID NO: 31 |
| 8 | | |
| AAVF1/HSC1 | 570 | WO2016049230 SEQ ID NO: 20 |
| AAVF2/HSC2 | 571 | WO2016049230 SEQ ID NO: 21 |
| AAVF3/HSC3 | 572 | WO2016049230 SEQ ID NO: 22 |
| AAVF4/HSC4 | 573 | WO2016049230 SEQ ID NO: 23 |
| AAVF5/HSC5 | 574 | WO2016049230 SEQ ID NO: 25 |
| AAVF6/HSC6 | 575 | WO2016049230 SEQ ID NO: 24 |
| AAVF7/HSC7 | 576 | WO2016049230 SEQ ID NO: 27 |
| AAVF8/HSC8 | 577 | WO2016049230 SEQ ID NO: 28 |
| AAVF9/HSC9 | 578 | WO2016049230 SEQ ID NO: 29 |
| AAVF11/HSC11 | 579 | WO2016049230 SEQ ID NO: 26 |
| AAVF12/HSC12 | 580 | WO2016049230 SEQ ID NO: 30 |
| AAVF13/HSC13 | 581 | WO2016049230 SEQ ID NO: 31 |
| AAVF14/HSC14 | 582 | WO2016049230 SEQ ID NO: 32 |
| AAVF15/HSC15 | 583 | WO2016049230 SEQ ID NO: 33 |
| AAVF16/HSC16 | 584 | WO2016049230 SEQ ID NO: 34 |
| AAVF17/HSC17 | 585 | WO2016049230 SEQ ID NO: 35 |
| AAVF1/HSC1 | 586 | WO2016049230 SEQ ID NO: 2 |
| AAVF2/HSC2 | 587 | WO2016049230 SEQ ID NO: 3 |
| AAVF3/HSC3 | 588 | WO2016049230 SEQ ID NO: 5 |
| AAVF4/HSC4 | 589 | WO2016049230 SEQ ID NO: 6 |
| AAVF5/HSC5 | 590 | WO2016049230 SEQ ID NO: 11 |
| AAVF6/HSC6 | 591 | WO2016049230 SEQ ID NO: 7 |
| AAVF7/HSC7 | 592 | WO2016049230 SEQ ID NO: 8 |
| AAVF8/HSC8 | 593 | WO2016049230 SEQ ID NO: 9 |
| AAVF9/HSC9 | 594 | WO2016049230 SEQ ID NO: 10 |
| AAVF11/HSC11 | 595 | WO2016049230 SEQ ID NO: 4 |
| AAVF12/HSC12 | 596 | WO2016049230 SEQ ID NO: 12 |
| AAVF13/HSC13 | 597 | WO2016049230 SEQ ID NO: 14 |
| AAVF14/HSC14 | 598 | WO2016049230 SEQ ID NO: 15 |
| AAVF15/HSC15 | 599 | WO2016049230 SEQ ID NO: 16 |
| AAVF16/HSC16 | 600 | WO2016049230 SEQ ID NO: 17 |
| AAVF17/HSC17 | 601 | WO2016049230 SEQ ID NO: 13 |
| AAV CBr-E1 | 602 | US8734809 SEQ ID NO: 13 |
| AAV CBr-E2 | 603 | US8734809 SEQ ID NO: 14 |
| AAV CBr-E3 | 604 | US8734809 SEQ ID NO: 15 |
| AAV CBr-E4 | 605 | US8734809 SEQ ID NO: 16 |
| AAV CBr-E5 | 606 | US8734809 SEQ ID NO: 17 |
| AAV CBr-e5 | 607 | US8734809 SEQ ID NO: 18 |
| AAV CBr-E6 | 608 | US8734809 SEQ ID NO: 19 |
| AAV CBr-E7 | 609 | US8734809 SEQ ID NO: 20 |
| AAV CBr-E8 | 610 | US8734809 SEQ ID NO: 21 |
| AAV CLv- | 611 | US8734809 SEQ ID NO: 22 |
| D1 | | |
| AAV CLv- | 612 | US8734809 SEQ ID NO: 23 |
| D2 | | |
| AAV CLv- | 613 | US8734809 SEQ ID NO: 24 |
| D3 | | |
| AAV CLv- | 614 | US8734809 SEQ ID NO: 25 |
| D4 | | |
| AAV CLv- | 615 | US8734809 SEQ ID NO: 26 |
| D5 | | |
| AAV CLv- | 616 | US8734809 SEQ ID NO: 27 |
| D6 | | |
| AAV CLv- | 617 | US8734809 SEQ ID NO: 28 |
| D7 | | |
| AAV Ctv- | 618 | US8734809 SEQ ID NO: 29 |
| 138 | | |
| AAV Ctv-E1 | 619 | US8734809 SEQ ID NO: 13 |
| AAV CLv- | 620 | US8734809 SEQ ID NO: 30 |
| R1 | | |
| AAV CLv- | 621 | US8734809 SEQ ID NO: 31 |
| R2 | | |
| AAV CLv- | 622 | US8734809 SEQ ID NO: 32 |
| R3 | | |
| AAV Ctv- | 623 | US8734809 SEQ ID NO: 33 |
| R4 | | |
| AAV CLv- | 624 | US8734809 SEQ ID NO: 34 |
| R5 | | |
| AAV CLv- | 625 | US8734809 SEQ ID NO: 35 |
| R6 | | |
| AAV CLv- | 626 | US8734809 SEQ ID NO: 36 |
| R7 | | |
| AAV CLv- | 627 | US8734809 SEQ ID NO: 37 |
| R8 | | |
| AAV Ctv- | 628 | US8734809 SEQ ID NO: 38 |
| R9 | | |
| AAV Ctg-F1 | 629 | US8734809 SEQ ID NO: 39 |
| AAV CLg-F2 | 630 | US8734809 SEQ ID NO: 40 |
| AAV Ctg-F3 | 631 | US8734809 SEQ ID NO: 41 |
| AAV CLg-F4 | 632 | US8734809 SEQ ID NO: 42 |
| AAV CLg-F5 | 633 | US8734809 SEQ ID NO: 43 |
| AAV Ctg-F6 | 634 | US8734809 SEQ ID NO: 43 |
| AAV CLg-F7 | 635 | US8734809 SEQ ID NO: 44 |
| AAV Ctg-F8 | 636 | US8734809 SEQ ID NO: 43 |
| AAV CSp-1 | 637 | US8734809 SEQ ID NO: 45 |
| AAV CSp-10 | 638 | US8734809 SEQ ID NO: 46 |
| AAV CSp-11 | 639 | US8734809 SEQ ID NO: 47 |
| AAV CSp-2 | 640 | US8734809 SEQ ID NO: 48 |
| AAV CSp-3 | 641 | US8734809 SEQ ID NO: 49 |
| AAV CSp-4 | 642 | US8734809 SEQ ID NO: 50 |
| AAV CSp-6 | 643 | US8734809 SEQ ID NO: 51 |
| AAV CSp-7 | 644 | US8734809 SEQ ID NO: 52 |
| AAV CSp-8 | 645 | US8734809 SEQ ID NO: 53 |
| AAV CSp-9 | 646 | US8734809 SEQ ID NO: 54 |
| AAV CHt-2 | 647 | US8734809 SEQ ID NO: 55 |
| AAV CHt-3 | 648 | US8734809 SEQ ID NO: 56 |
| AAV CKd-1 | 649 | US8734809 SEQ ID NO: 57 |
| AAV CKd-10 | 650 | US8734809 SEQ ID NO: 58 |
| AAV CKd-2 | 651 | US8734809 SEQ ID NO: 59 |
| AAV CKd-3 | 652 | US8734809 SEQ ID NO: 60 |
| AAV CKd-4 | 653 | US8734809 SEQ ID NO: 61 |
| AAV CKd-6 | 654 | US8734809 SEQ ID NO: 62 |
| AAV CKd-7 | 655 | US8734809 SEQ ID NO: 63 |
| AAV CKd-8 | 656 | US8734809 SEQ ID NO: 64 |
| AAV CLv-1 | 657 | US8734809 SEQ ID NO: 65 |
| AAV CLv-12 | 658 | US8734809 SEQ ID NO: 66 |
| AAV CLv-13 | 659 | US8734809 SEQ ID NO: 67 |
| AAV CLv-2 | 660 | US8734809 SEQ ID NO: 68 |
| AAV CLv-3 | 661 | US8734809 SEQ ID NO: 69 |
| AAV CLv-4 | 662 | US8734809 SEQ ID NO: 70 |
| AAV CLv-6 | 663 | US8734809 SEQ ID NO: 71 |
| AAV CLv-8 | 664 | US8734809 SEQ ID NO: 72 |
| AAV CKd- | 665 | US8734809 SEQ ID NO: 73 |
| B1 | | |
| AAV CKd- | 666 | US8734809 SEQ ID NO: 74 |
| B2 | | |
| AAV CKd- | 667 | US8734809 SEQ ID NO: 75 |
| B3 | | |
| AAV CKd- | 668 | US8734809 SEQ ID NO: 76 |
| B4 | | |
| AAV CKd- | 669 | US8734809 SEQ ID NO: 77 |
| B5 | | |
| AAV CKd- | 670 | US8734809 SEQ ID NO: 78 |
| B6 | | |
| AAV CKd- | 671 | US8734809 SEQ ID NO: 79 |
| B7 | | |
| AAV CKd- | 672 | US8734809 SEQ ID NO: 80 |
| B8 | | |
| AAV CKd- | 673 | US8734809 SEQ ID NO: 81 |
| H1 | | |
| AAV CKd- | 674 | US8734809 SEQ ID NO: 82 |
| H2 | | |
| AAV CKd- | 675 | US8734809 SEQ ID NO: 83 |
| H3 | | |
| AAV CKd- | 676 | US8734809 SEQ ID NO: 84 |
| H4 | | |
| AAV CKd- | 677 | US8734809 SEQ ID NO: 85 |
| H5 | | |
| AAV CKd- | 678 | US8734809 SEQ ID NO: 77 |
| H6 | | |
| AAV CHt-1 | 679 | US8734809 SEQ ID NO: 86 |
| AAV CLv1-1 | 680 | US8734809 SEQ ID NO: 171 |
| AAV CLv1-2 | 681 | US8734809 SEQ ID NO: 172 |
| AAV CLv1-3 | 682 | US8734809 SEQ ID NO: 173 |
| AAV CLv1-4 | 683 | US8734809 SEQ ID NO: 174 |
| AAV Clv1-7 | 684 | US18734809 SEQ ID NO: 175 |
| AAV Clv1-8 | 685 | US8734809 SEQ ID NO: 176 |
| AAV Clv1-9 | 686 | US8734809 SEQ ID NO: 177 |
| AAV Clv1- | 687 | US8734809 SEQ ID NO: 178 |
| 10 | | |
| AAV.VR-355 | 688 | US8734809 SEQ ID NO: 181 |
| AAV.hu.48R | 689 | US8734809 SEQ ID NO: 183 |
| 3 | | |
| AAV CBr-E1 | 690 | US8734809 SEQ ID NO: 87 |
| AAV CBr-E2 | 691 | US8734809 SEQ ID NO: 88 |
| AAV CBr-E3 | 692 | US8734809 SEQ ID NO: 89 |
| AAV CBr-E4 | 693 | US8734809 SEQ ID NO: 90 |
| AAV CBr-E5 | 694 | US8734809 SEQ ID NO: 91 |
| AAV CBL-e5 | 695 | US8734809 SEQ ID NO: 92 |
| AAV CBr-E6 | 696 | US8734809 SEQ ID NO: 93 |
| AAV CBr-E7 | 697 | US8734809 SEQ ID NO: 94 |
| AAV CBr-E8 | 698 | US8734809 SEQ ID NO: 95 |
| AAV CLv- | 699 | US8734809 SEQ ID NO: 96 |
| Dl | | |
| AAV CLv- | 700 | US8734809 SEQ ID NO: 97 |
| D2 | | |
| AAV CLv- | 701 | US8734809 SEQ ID NO: 98 |
| D3 | | |
| AAV CLv- | 702 | US8734809 SEQ ID NO: 99 |
| D4 | | |
| AAV CLv- | 703 | US8734809 SEQ ID NO: 100 |
| D5 | | |
| AAV CLv- | 704 | US8734809 SEQ ID NO: 101 |
| D6 | | |
| AAV CLv- | 705 | US8734809 SEQ ID NO: 102 |
| D7 | | |
| AAV CLv- | 706 | US8734809 SEQ ID NO: 103 |
| D8 | | |
| AAV CLv-E1 | 707 | US8734809 SEQ ID NO: 87 |
| AAV CLv- | 708 | US8734809 SEQ ID NO: 104 |
| RI | | |
| AAV CLv- | 709 | US8734809 SEQ ID NO: 105 |
| R2 | | |
| AAV CLv- | 710 | US8734809 SEQ ID NO: 106 |
| R3 | | |
| AAV CLv- | 711 | US8734809 SEQ ID NO: 107 |
| R4 | | |
| AAV CLv- | 712 | US8734809 SEQ ID NO: 108 |
| R5 | | |
| AAV CLv- | 713 | US8734809 SEQ ID NO: 109 |
| R6 | | |
| AAV CLv- | 714 | US8734809 SEQ ID NO: 110 |
| R7 | | |
| AAV CLv- | 715 | US8734809 SEQ ID NO: 111 |
| R8 | | |
| AAV CLv- | 716 | US8734809 SEQ ID NO: 112 |
| R9 | | |
| AAV CLg-F1 | 717 | US8734809 SEQ ID NO: 113 |
| AAV CLg-F2 | 718 | US8734809 SEQ ID NO: 114 |
| AAV CLg-F3 | 719 | US8734809 SEQ ID NO: 115 |
| AAV CLg-F4 | 720 | US8734809 SEQ ID NO: 116 |
| AAV CLg-F5 | 721 | US8734809 SEQ ID NO: 117 |
| AAV CLg-F6 | 722 | US8734809 SEQ ID NO: 117 |
| AAV CLg-F7 | 723 | US8734809 SEQ ID NO: 118 |
| AAV CLg-F8 | 724 | US8734809 SEQ ID NO: 117 |
| AAV CSp-1 | 725 | US8734809 SEQ ID NO: 119 |
| AAV CSp-10 | 726 | US8734809 SEQ ID NO: 120 |
| AAV CSp-11 | 727 | US8734809 SEQ ID NO: 121 |
| AAV CSp-2 | 728 | US8734809 SEQ ID NO: 122 |
| AAV CSp-3 | 729 | US8734809 SEQ ID NO: 123 |
| AAV CSp-4 | 730 | US8734809 SEQ ID NO: 124 |
| AAV CSp-6 | 731 | US8734809 SEQ ID NO: 125 |
| AAV CSp-7 | 732 | US8734809 SEQ ID NO: 126 |
| AAV CSp-8 | 733 | US8734809 SEQ ID NO: 127 |
| AAV CSp-9 | 734 | US8734809 SEQ ID NO: 128 |
| AAV CHt-2 | 735 | US8734809 SEQ ID NO: 129 |
| AAV CHt-3 | 736 | US8734809 SEQ ID NO: 130 |
| AAV CKd-1 | 737 | US8734809 SEQ ID NO: 131 |
| AAV CKd-10 | 738 | US8734809 SEQ ID NO: 132 |
| AAV CKd-2 | 739 | US8734809 SEQ ID NO: 133 |
| AAV CKd-3 | 740 | US8734809 SEQ ID NO: 134 |
| AAV CKd-4 | 741 | US8734809 SEQ ID NO: 135 |
| AAV CKd-6 | 742 | US8734809 SEQ ID NO: 136 |
| AAV CKd-7 | 743 | US8734809 SEQ ID NO: 137 |
| AAV CKd-8 | 744 | US8734809 SEQ ID NO: 138 |
| AAV CLv-1 | 745 | US8734809 SEQ ID NO: 139 |
| AAV CLv-2 | 746 | US8734809 SEQ ID NO: 140 |
| AAV CLv-3 | 747 | US8734809 SEQ ID NO: 141 |
| AAV CLv-2 | 748 | US8734809 SEQ ID NO: 142 |
| AAV CLv-3 | 749 | US8734809 SEQ ID NO: 143 |
| AAV CLv-4 | 750 | US8734809 SEQ ID NO: 144 |
| AAV CLv-6 | 751 | US8734809 SEQ ID NO: 145 |
| AAV CLy-8 | 752 | US8734809 SEQ ID NO: 146 |
| AAV CKd- | 753 | US8734809 SEQ ID NO: 147 |
| B1 | | |
| AAV CKd- | 754 | US8734809 SEQ ID NO: 148 |
| B2 | | |
| AAV CKd- | 755 | US8734809 SEQ ID NO: 149 |
| B3 | | |
| AAV CKd- | 756 | US8734809 SEQ ID NO: 150 |
| B4 | | |
| AAV CKd- | 757 | US8734809 SEQ ID NO: 151 |
| B5 | | |
| AAV CKd- | 758 | US8734809 SEQ ID NO: 152 |
| B6 | | |
| AAV CKd- | 759 | US8734809 SEQ ID NO: 153 |
| B7 | | |
| AAV CKd- | 760 | US8734809 SEQ ID NO: 154 |
| B8 | | |
| AAV CKd- | 761 | US8734809 SEQ ID NO: 155 |
| H1 | | |
| AAV CKd- | 762 | US8734809 SW ID NO: 156 |
| H2 | | |
| AAV CKd- | 763 | US8734809 SEQ ID NO: 157 |
| H3 | | |
| AAV CKd- | 764 | US8734809 SEQ ID NO: 158 |
| H4 | | |
| AAV CKd- | 765 | US8734809 SEQ H) NO: 159 |
| H5 | | |
| AAV CKd- | 766 | US8734809 SEQ ID NO: 151 |
| H6 | | |
| AAV CHt-1 | 767 | US8734809 SEQ ID NO: 160 |
| AAV CHt-P2 | 768 | WO2016065001 SEQ ID NO: 1 |
| AAV CHt-P5 | 769 | WO2016065001 SEQ ID NO: 2 |
| AAV CHt-P9 | 770 | WO2016065001 SEQ ID NO: 3 |
| AAV CBr- | 771 | WO2016065001 SEQ ID NO: 4 |
| 7.1 | | |
| AAV CBr- | 772 | WO2016065001 SEQ ID NO: 5 |
| 7.2 | | |
| AAV CBr- | 773 | WO2016065001 SEQ ID NO: 6 |
| 7.3 | | |
| AAV CBr- | 774 | WO2016065001 SEQ ID NO: 7 |
| 7.4 | | |
| AAV CBr- | 775 | WO2016065001 SEQ ID NO: 8 |
| 7.5 | | |
| AAV CBr- | 776 | WO2016065001 SEQ ID NO: 9 |
| 7.7 | | |
| AAV CBr- | 777 | WO2016065001 SEQ ID NO: 10 |
| 7.8 | | |
| AAV CBr- | 778 | WO2016065001 SEQ ID NO: 11 |
| 7.10 | | |
| AAV CKd- | 779 | WO2016065001 SEQ ID NO: 12 |
| N3 | | |
| AAV CKd- | 780 | WO2016065001 SEQ ID NO: 13 |
| N4 | | |
| AAV CKd- | 781 | WO2016065001 SEQ ID NO: 14 |
| N9 | | |
| AAV CLv-L4 | 782 | WO2016065001 SEQ ID NO: 15 |
| AAV CLv-L5 | 783 | WO2016065001 SEQ ID NO: 16 |
| AAV CLv-L6 | 784 | WO2016065001 SEQ ID NO: 17 |
| AAV CLv- | 785 | WO2016065001 SEQ ID NO: 18 |
| K1 | | |
| AAV CLv- | 786 | WO2016065001 SEQ ID NO: 19 |
| K3 | | |
| AAV CLv- | 787 | WO2016065001 SEQ ID NO: 20 |
| K6 | | |
| AAV CLv- | 788 | WO2016065001 SEQ ID NO: 21 |
| M1 | | |
| AAV CLv- | 789 | WO2016065001 SEQ ID NO: 22 |
| M11 | | |
| AAV CLv- | 790 | WO2016065001 SEQ ID NO: 23 |
| M2 | | |
| AAV CLv- | 791 | WO2016065001 SEQ ID NO: 24 |
| M5 | | |
| AAV CLv- | 792 | WO2016065001 SEQ ID NO: 25 |
| M6 | | |
| AAV CLv- | 793 | WO2016065001 SEQ ID NO: 26 |
| M7 | | |
| AAV CLv- | 794 | WO2016065001 SEQ ID NO: 27 |
| M8 | | |
| AAV CLv- | 795 | WO2016065001 SEQ ID NO: 28 |
| M9 | | |
| AAV CHt-P1 | 796 | WO2016065001 SEQ ID NO: 29 |
| AAV CHt-P6 | 797 | WO2016065001 SEQ ID NO: 30 |
| AAV CHt-P8 | 798 | WO2016065001 SEQ ID NO: 31 |
| AAV CHt- | 799 | WO2016065001 SEQ ID NO: 32 |
| 6.1 | | |
| AAV CHt- | 800 | WO2016065001 SEQ ID NO: 33 |
| 6.10 | | |
| AAV CHt- | 801 | WO2016065001 SEQ ID NO: 34 |
| 6.5 | | |
| AAV CHt- | 802 | WO2016065001 SEQ ID NO: 35 |
| 6.6 | | |
| AAV CHt- | 803 | WO2016065001 SEQ ID NO: 36 |
| 6.7 | | |
| AAV CHt- | 804 | WO2016065001 SEQ ID NO: 37 |
| 6.8 | | |
| AAV CSp- | 805 | WO2016065001 SEQ ID NO: 38 |
| 8.10 | | |
| AAV CSp- | 806 | WO2016065001 SEQ ID NO: 39 |
| 8.2 | | |
| AAV CSp- | 807 | WO2016065001 SEQ ID NO: 40 |
| 8.4 | | |
| AAV CSp- | 808 | WO2016065001 SEQ ID NO: 41 |
| 8.5 | | |
| AAV CSp- | 809 | WO2016065001 SEQ ID NO: 42 |
| 8.6 | | |
| AAV CSp- | 810 | WO2016065001 SEQ ID NO: 43 |
| 8.7 | | |
| AAV CSp- | 811 | WO2016065001 SEQ ID NO: 44 |
| 8.8 | | |
| AAV CSp- | 812 | WO2016065001 SEQ ID NO: 45 |
| 8.9 | | |
| AAV CBr- | 813 | WO2016065001 SEQ ID NO: 46 |
| B7.3 | | |
| AAV CBr- | 814 | WO2016065001 SEQ ID NO: 47 |
| B7.4 | | |
| AAV3B | 815 | WO2016065001 SEQ ID NO: 48 |
| AAV4 | 816 | WO2016065001 SEQ ID NO: 49 |
| AAV5 | 817 | WO2016065001 SEQ ID NO: 50 |
| AAV CHt-P2 | 818 | WO2016065001 SEQ ID NO: 51 |
| AAV CHt-P5 | 819 | WO2016065001 SEQ ID NO: 52 |
| AAV CHt-P9 | 820 | WO2016065001 SEQ ID NO: 53 |
| AAV CBr- | 821 | WO2016065001 SEQ ID NO: 54 |
| 7.1 | | |
| AAV CBr- | 822 | WO2016065001 SEQ ID NO: 55 |
| 7.2 | | |
| AAV CBr- | 823 | WO2016065001 SEQ ID NO: 56 |
| 7.3 | | |
| AAV CBr- | 824 | WO2016065001 SEQ ID NO: 57 |
| 7.4 | | |
| AAV CBr- | 825 | WO2016065001 SEQ ID NO: 58 |
| 7.5 | | |
| AAV CBr- | 826 | WO2016065001 SEQ ID NO: 59 |
| 7.7 | | |
| AAV CBr- | 827 | WO2016065001 SEQ ID NO: 60 |
| 7.8 | | |
| AAV CBr- | 828 | WO2016065001 SEQ ID NO: 61 |
| 7.10 | | |
| AAV CKd- | 829 | WO2016065001 SEQ ID NO: 62 |
| N3 | | |
| AAV CKd- | 830 | WO2016065001 SEQ ID NO: 63 |
| N4 | | |
| AAV CKd- | 831 | WO2016C65001 SEQ ID NO: 64 |
| N9 | | |
| AAV CLv-L4 | 832 | WO2016065001 SEQ ID NO: 65 |
| AAV CLv-L5 | 833 | WO2016065001 SEQ ID NO: 66 |
| AAV CLv-L6 | 834 | WO2016065001 SEQ ID NO: 67 |
| AAV CLv- | 835 | WO2016065001 SEQ ID NO: 68 |
| K1 | | |
| AAV CLv- | 836 | WO2016065001 SEQ ID NO: 69 |
| K3 | | |
| AAV CLv- | 837 | WO2016065001 SEQ ID NO: 70 |
| K6 | | |
| AAV CLv- | 838 | WO2016065001 SEQ ID NO: 71 |
| M1 | | |
| AAV CLv- | 839 | WO2016065001 SEQ ID NO: 72 |
| M11 | | |
| AAV CLv- | 840 | WO2016065001 SEQ ID NO: 73 |
| M2 | | |
| AAV CLv- | 841 | WO2016065001 SEQ ID NO: 74 |
| M5 | | |
| AAV CLv- | 842 | WO2016065001 SEQ ID NO 75 |
| M6 | | |
| AAV CLv- | 843 | WO2016065001 SEQ ID NO: 76 |
| M7 | | |
| AAV CLv- | 844 | WO2016065001 SEQ ID NO: 77 |
| M8 | | |
| AAV CLv- | 845 | WO2016065001 SEQ ID NO: 78 |
| M9 | | |
| AAV CHt-P1 | 846 | WO2016065001 SEQ ID NO: 79 |
| AAV CHt-P6 | 847 | WO2016065001 SEQ ID NO: 80 |
| AAV CHt-P8 | 848 | WO2016065001 SEQ ID NO: 81 |
| AAV CHt- | 849 | WO2016065001 SEQ ID NO: 82 |
| 6.1 | | |
| AAV CHt- | 850 | WO2016065001 SEQ ID NO: 83 |
| 6.10 | | |
| AAV CHt- | 851 | WO2016065001 SEQ ID NO: 84 |
| 6.5 | | |
| AAV CHI- | 852 | WO2016065001 SEQ ID NO: 85 |
| 6.6 | | |
| AAV CHt- | 853 | WO2016065001 SEQ ID NO: 86 |
| 6.7 | | |
| AAV CHt- | 854 | WO2016065001 SEQ ID NO: 87 |
| 6.8 | | |
| AAV CSp- | 855 | WO2016065001 SEQ ID NO: 88 |
| 8.10 | | |
| AAV CSp- | 856 | WO2016065001 SEQ ID NO: 89 |
| 8.2 | | |
| AAV CSp- | 857 | WO2016065001 SEQ ID NO: 90 |
| 8.4 | | |
| AAV CSp- | 858 | WO2016065001 SEQ ID NO: 91 |
| 8.5 | | |
| AAV CSp- | 859 | WO2016065001 SEQ ID NO: 92 |
| 8.6 | | |
| AAV CSp- | 860 | WO2016065001 SEQ ID NO: 93 |
| 8.7 | | |
| AAV CSp- | 861 | WO2016065001 SEQ ID NO: 94 |
| 8.8 | | |
| AAV CSp- | 862 | WO2016C65001 SEQ ID NO: 95 |
| 8.9 | | |
| AAV CBr- | 863 | WO2016065001 SEQ ID NO: 96 |
| B7.3 | | |
| AAV CBr- | 864 | WO2016065001 SEQ ID NO: 97 |
| B7.4 | | |
| AAV3B | 865 | WO2016065001 SEQ ID NO: 98 |
| AAV4 | 866 | WO2016065001 SEQ ID NO: 99 |
| AAV5 | 867 | WO2016065001 SEQ ID NO: 100 |
| AAVPHP.B | 868 | WO2015038958 SEQ ID NO: 8 and 13; GenBankALUS85156.1 |
| or G2B-26 | | |
| AAVPHP.B | 869 | WO2015038958 SEQ ID NO: 9 |
| AAVG2B-13 | 870 | WO2015038958 SEQ ID NO: 12 |
| AAVTH1.1- | 871 | WO2015038958 SEQ ID NO: 14 |
| 32 | | |
| AAVTH1.1- | 872 | WO2015038958 SEQ ID NO: 15 |
| 35 | | |
| PHP.N/PHP.B-DGT | 1418 | WO2017100671 SEQ ID NO: 46 |
| PHP.S/G2A12 | 1419 | WO2017100671 SEQ ID NO: 47 |
| AAV9/hu.14 | 1420 | WO2017100671 SEQ ID NO: 45 |
| K449R | | |
| GPV | 1421 | US9624274B2 SEQ ID NO: 192 |
| B19 | 1422 | US9624274B2 SEQ ID NO: 193 |
| MVM | 1423 | US9624274B2 SEQ ID NO: 194 |
| FPV | 1424 | US9624274B2 SEQ ID NO: 195 |
| CPV | 1425 | US9624274B2 SEQ ID NO: 196 |
| AAV6 | 1426 | US9546112B2 SEQ ID NO: 5 |
| AAV6 | 1427 | US9457103B2 SEQ ID NO: 1 |
| AAV2 | 1428 | US9457103B2 SEQ ID NO: 2 |
| ShH10 | 1429 | US9457103B2 SEQ ID NO: 3 |
| ShH13 | 1430 | US9457103B2 SEQ ID NO: 4 |
| ShH10 | 1431 | US9457103B2 SEQ ID NO: 5 |
| ShH10 | 1432 | US9457103B2 SEQ ID NO:6 |
| ShH10 | 1433 | US9457103B2 SEQ ID NO: 7 |
| ShH10 | 1434 | US9457103B2 SEQ ID NO: 8 |
| ShH10 | 1435 | US9457103B2 SEQ ID NO: 9 |
| rh74 | 1436 | US9434928B2 SEQ ID NO: 1 US2015023924A1 SEQ ID NO: 2 |
| rh74 | 1437 | US9434928B2 SEQ ID NO: 2, US2015023924A1 SEQ ID NO: 1 |
| AAV8 | 1438 | US9434928B2 SEQ ID NO: 4 |
| rh74 | 1439 | US9434928B2 SEQ ID NO: 5 |
| rh74 (RHM4- | 1440 | US2015023924A1 SEQ ID NO: 5, US20160375110A1 SEQ ID NO: 4 |
| 1) | | |
| rh74 | 1441 | US2015023924A1 SEQ ID NO: 6, US20160375110A1 SEQ ID NO: 5 |
| (RHM15-1) | | |
| rh74 | 1442 | US2015023924A1 SEQ ID NO: 7, US20160375110A1 SEQ ID NO: 6 |
| (RHM15-2) | | |
| rh74 | 1443 | US2015023924A1 SEQ ID NO: 8, US20160375110A1 SEQ ID NO: 7 |
| (RHM15- | | |
| 3/RhM15-5) | | |
| rh74 | 1444 | US2015023924A1 SEQ ID NO: 9, US20160375110A1 SEQ ID NO: 8 |
| (RHM15-4) | | |
| rh74 | 1445 | US2015023924A1 SEQ ID NO: 10, US20160375110A1 SEQ ID NO: 9 |
| (RHM15-6) | | |
| rh74 (RHM4- | 1446 | US2015023924A1 SEQ ID NO: 11 |
| 1) | | |
| rh74 | 1447 | US2015023924A1 SEQ ID NO: 12 |
| (RHM15-1) | | |
| rh74 | 1448 | US2015023924A1 SEQ ID NO: 13 |
| (RHM15-2) | | |
| rh74 | 1449 | US2015023924A1 SEQ ID NO: 14 |
| (RHM15- | | |
| 3/RHM15-5) | | |
| rh74 | 1450 | 1-152015023924A1 SEQ ID NO: 15 |
| (RHM15-4) | | |
| rh74 | 1451 | US2015023924A1 SEQ ID NO: 16 |
| (RHM15-6) | | |
| AAV2 | 1452 | US20160175389A1 SEQ ID NO: 9 |
| (comprising | | |
| lung specific | | |
| polypeptide) | | |
| AAV2 | 1453 | US20160175389A1 SEQ ID NO: 10 |
| (comprising | | |
| lung specific | | |
| poly peptide) | | |
| Anc80 | 1454 | US20170051257A1 SEQ ID NO: 1 |
| Anc80 | 1455 | US20170051257A1 SEQ ID NO: 2 |
| Anc81 | 1456 | US20170051257A1 SEQ ID NO: 3 |
| Anc80 | 1457 | US20170051257A1 SEQ ID NO: 4 |
| Anc82 | 1458 | US20170051257A1 SEQ ID NO: 5 |
| Anc82 | 1459 | US20170051257A1 SEQ ID NO: 6 |
| Anc83 | 1460 | US20170051257A1 SEQ ID NO: 7 |
| Anc83 | 1461 | US20170051257A1 SEQ ID NO: 8 |
| Anc84 | 1462 | US20170051257A1 SEQ ID NO: 9 |
| Anc84 | 1463 | US20170051257A1 SEQ ID NO: 10 |
| Anc94 | 1464 | US20170051257A1 SEQ ID NO: 11 |
| Anc94 | 1465 | US20170051257A1 SEQ ID NO: 12 |
| Anc113 | 1466 | US20170051257A1 SEQ ID NO: 13 |
| Anc113 | 1467 | US20170051257A1 SEQ ID NO: 14 |
| Anc126 | 1468 | US20170051257A1 SEQ ID NO: 15 |
| Anc126 | 1469 | US20170051257A1 SEQ ID NO: 16 |
| Anc127 | 1470 | US20170051257A1 SEQ ID NO: 17 |
| Anc127 | 1471 | US20170051257A1 SEQ ID NO: 18 |
| Anc80L27 | 1472 | US20170051257A1 SEQ ID NO: 19 |
| Anc80L59 | 1473 | US20170051257A1 SEQ ID NO: 20 |
| Anc80L60 | 1474 | US20170051257A1 SEQ ID NO: 21 |
| Anc80L62 | 1475 | US20170051257A1 SEQ ID NO: 22 |
| Anc80L65 | 1476 | US20170051257A SEQ ID NO: 23 |
| Anc80L33 | 1477 | US20170051257A1 SEQ ID NO: 24 |
| Anc80L36 | 1478 | US20170051257A1 SEQ ID NO: 25 |
| Anc80L44 | 1479 | US20170051257A1 SEQ ID NO: 26 |
| Anc80L1 | 1480 | US20170051257A1 SEQ ID NO: 35 |
| Anc80L1 | 1481 | US20170051257A1 SEQ ID NO: 36 |
| AAV-X1 | 1482 | US8283151B2 SEQ ID NO: 11 |
| AAV-X1b | 1483 | US8283151B2 SEQ ID NO: 12 |
| AAV-X5 | 1484 | US8283151B2 SEQ ID NO: 13 |
| AAV-X19 | 1485 | US8283151B2 SEQ ID NO: 14 |
| AAV-X21 | 1486 | US8283151B2 SEQ ID NO: 15 |
| AAV-X22 | 1487 | US8283151B2 SEQ ID NO: 16 |
| AAV-X23 | 1488 | US8283151B2 SEQ ID NO: 17 |
| AAV-X24 | 1489 | US8283151B2 SEQ ID NO: 18 |
| AAV-X75 | 1490 | US8283151B2 SEQ ID NO: 19 |
| AAV-X26 | 1491 | US8283151B2 SEQ ID NO: 20 |
| AAV-X1 | 1492 | US8283151B2 SEQ ID NO: 21 |
| AAV-X1b | 1493 | US8283151B2 SEQ ID NO: 22 |
| AAV-X5 | 1494 | US8283151B2 SEQ ID NO: 23 |
| AAV-X19 | 1495 | US8283151B2 SEQ ID NO: 24 |
| AAV-X21 | 1496 | US8283151B2 SEQ ID NO: 25 |
| AAV-X22 | 1497 | US8283151B2 SEQ ID NO: 26 |
| AAV-X23 | 1498 | US8283151B2 SEQ H) NO: 27 |
| AAV-X24 | 1499 | US8283151B2 SEQ ID NO: 28 |
| AAV-X25 | 1500 | US8283151B2 SEQ ID NO: 29 |
| AAV-X26 | 1501 | US8283151B2 SEQ ID NO: 30 |
| AAVrh8 | 1502 | WO2016054554A1 SEQ ID NO: 8 |
| AAVrh8VP2 | 1503 | WO2016054554A1 SEQ ID NO: 9 |
| FC5 | | |
| AAVrh8VP2 | 1504 | WO2016054554A1 SEQ ID NO: 10 |
| FC44 | | |
| AAVrh8VP2 | 1505 | WO2016054554A1 SEQ ID NO: It |
| ApoB100 | | |
| AAVrh8VP2 | 1506 | WO2016054554A1 SEQ ID NO: 12 |
| RVG | | |
| AAVrh8VP2 | 1507 | WO2016054554A1 SEQ ID NO: 13 |
| Angiopep-2 | | |
| VP2 | | |
| AAV9.47VP | 1508 | WO2016054554A1 SEQ ID NO: 14 |
| 1.3 | | |
| AAV9.47VP | 1509 | WO2016054554A1 SEQ ID NO: 15 |
| 2ICAMg3 | | |
| AAV9.47VP | 1510 | WO2016054554A1 SEQ ID NO: 16 |
| 2RVG | | |
| AAV9.47VP | 1511 | WO2016054554A1 SEQ ID NO: 17 |
| 2Angiopep-2 | | |
| AAV9,47VP | 1512 | WO2016054554A1 SEQ ID NO: 18 |
| 2A-string | | |
| AAVrh8VP2 | 1513 | WO2016054554A1 SEQ ID NO: 19 |
| FC5 VP2 | | |
| AAVrh8VP2 | 1514 | WO2016054554A1 SEQ ID NO: 20 |
| FC44 VP2 | | |
| AAVrh8VP2 | 1515 | WO2016054554A1 SEQ ID NO: 21 |
| ApoB100 | | |
| VP2 | | |
| AAVrh8VP2 | 1516 | WO2016054554A1 SEQ ID NO: 22 |
| RVG VP2 | | |
| AAVrh8VP2 | 1517 | WO2016054554A1 SEQ ID NO: 23 |
| Angiopep-2 | | |
| VP2 | | |
| AAV9.47VP | 1518 | WO2016054554A1 SEQ ID NO: 24 |
| 2ICAMg3 | | |
| VP2 | | |
| AAV9.47-VP | 1519 | WO2016054554A1 SEQ ID NO: 25 |
| 2RVG | VP2 | |
| AAV9,47VP | 1520 | WO2016054554A1 SEQ ID NO: 26 |
| 2Angiopep-2 | | |
| VP2 | | |
| AAV9.47VP | 1521 | WO2016054554A1 SEQ ID NO: 27 |
| 2A-string | | |
| VP2 | | |
| rAAV-B1 | 1522 | WO2016054557A1 SEQ ID NO: 1 |
| rAAV-B2 | 1523 | WO2016054557A1 SEQ ID NO: 2 |
| rAAV-B3 | 1524 | WO2016054557A1 SEQ ID NO: 3 |
| rAAV-B4 | 1525 | WO2016054557A1 SEQ ID NO: 4 |
| rAAV-B1 | 1526 | WO201.6054557A1 SEQ ID NO: 5 |
| rAAV-B2 | 1527 | WO2016054557A1 SEQ ID NO: 6 |
| rAAV-B3 | 1528 | WO2016054557A1 SEQ ID NO: 7 |
| rAAV-B4 | 1529 | WO2016054557A1 SEQ ID NO: 8 |
| rAAV-L1 | 1530 | WO2016054557A1 SEQ ID NO: 9 |
| rAAV-L2 | 1531 | WO2016054557A1 SEQ ID NO: 10 |
| rAAV-L3 | 1532 | WO2016054557A1 SEQ ID NO: 11 |
| rAAV-L4 | 1533 | WO2016054557A1 SEQ ID NO: 12 |
| rAAV-L1 | 1534 | WO2016054557A1 SEQ ID NO: 13 |
| rAAV-L2 | 1535 | WO2016054557A1 SEQ ID NO: 14 |
| rAAV-L3 | 1536 | WO2016054557A1 SEQ ID NO: 15 |
| rAAV-L4 | 1537 | WO2016054557A1 SEQ ID NO: 16 |
| rAAV9 | 1538 | WO2016073739A1 SEQ ID NO: 3 |
| rAAV | 1539 | WO2016081811A1 SEQ ID NO: 1 |
| rAAV | 1540 | WO2016081811A1 SEQ ID NO: 2 |
| rAAV | 1541 | WO2016081811A1 SEQ ID NO: 3 |
| rAAV | 1542 | WO2016081811A1 SEQ ID NO: 4 |
| rAAV | 1543 | WO2016081811A1 SEQ ID NO: 5 |
| rAAV | 1544 | WO2016081811A1 SEQ ID NO: 6 |
| rAAV | 1545 | WO2016081811A1 SEQ ID NO: 7 |
| rAAV | 1546 | WO2016081811A1 SEQ ID NO: 8 |
| rAAV | 1547 | WO2016081811A1 SEQ ID NO: 9 |
| rAAV | 1548 | WO2016081811A1 SEQ ID NO: 10 |
| rAAV | 1549 | WO2016081811A1 SEQ ID NO: 11 |
| rAAV | 1550 | WO2016081811A1 SEQ ID NO: 12 |
| rAAV | 1551 | WO2016081811A1 SEQ ID NO: 13 |
| rAAV | 1552 | WO2016081811A1 SEQ ID NO: 14 |
| rAAV | 1553 | WO2016081811A1 SEQ ID NO: 15 |
| rAAV | 1554 | WO2016081811A1 SEQ ID NO: 16 |
| rAAV | 1555 | WO2016081811A1 SEQ ID NO: 17 |
| rAAV | 1556 | WO2016081811A1 SEQ ID NO: 18 |
| rAAV | 1557 | WO2016081811A1 SEQ ID NO: 19 |
| rAAV | 1558 | WO2016081811A1 SEQ ID NO: 20 |
| rAAV | 1559 | WO2016081811A1 SEQ ID NO: 21 |
| rAAV | 1560 | WO2016081811A1 SEQ ID NO: 22 |
| rAAV | 1561 | WO2016081811A1 SEQ ID NO: 23 |
| rAAV | 1562 | WO2016081811A1 SEQ ID NO: 24 |
| rAAV | 1563 | WO2016081811A1 SEQ ID NO: 25 |
| rAAV | 1564 | WO2016081811A1 SEQ ID NO: 26 |
| rAAV | 1565 | WO2016081811A1 SEQ ID NO: 27 |
| rAAV | 1566 | WO2016081811A1 SEQ ID NO: 28 |
| rAAV | 1567 | WO2016081811A1 SEQ ID NO: 29 |
| rAAV | 1568 | WO2016081811A1 SEQ ID NO: 30 |
| rAAV | 1569 | WO2016081811A1 SEQ ID NO: 31 |
| rAAV | 1570 | WO2016081811A1 SEQ ID NO: 32 |
| rAAV | 1571 | WO2016081811A1 SEQ ID NO: 33 |
| rAAV | 1572 | WO2016081811A1 SEQ ID NO: 34 |
| rAAV | 1573 | WO2016081811A1 SEQ ID NO: 35 |
| rAAV | 1574 | WO2016081811A1 SEQ ID NO: 36 |
| rAAV | 1575 | WO2016081811A1 SEQ ID NO: 37 |
| rAAV | 1576 | WO2016081811A1 SEQ ID NO: 38 |
| rAAV | 1577 | WO2016081811A1 SEQ ID NO: 39 |
| rAAV | 1578 | WO2016081811A1 SEQ ID NO: 40 |
| rAAV | 1579 | WO2016081811A1 SEQ ID NO: 41 |
| rAAV | 1580 | WO2016081811A1 SEQ ID NO: 42 |
| rAAV | 1581 | WO2016081811A1 SEQ ID NO: 43 |
| rAAV | 1582 | WO2016081811A1 SEQ ID NO: 44 |
| rAAV | 1583 | WO2016081811A1 SEQ ID NO: 45 |
| rAAV | 1584 | WO2016081811A1 SEQ ID NO: 46 |
| rAAV | 1585 | WO2016081811A1 SEQ ID NO: 47 |
| rAAV | 1586 | WO2016081811A1 SEQ ID NO: 48 |
| rAAV | 1587 | WO2016081811A1 SEQ ID NO: 49 |
| rAAV | 1588 | WO2016081811A1 SEQ ID NO: 50 |
| rAAV | 1589 | WO2016081811A1 SEQ ID NO: 51 |
| rAAV | 1590 | WO2016081811A1 SEQ ID NO: 52 |
| rAAV | 1591 | WO2016081811A1 SEQ ID NO: 53 |
| rAAV | 1592 | WO2016081811A1 SEQ ID NO: 54 |
| rAAV | 1593 | WO2016081811A1 SEQ ID NO: 55 |
| rAAV | 1594 | WO2016081811A1 SEQ ID NO: 56 |
| rAAV | 1595 | WO2016081811A1 SEQ ID NO: 57 |
| rAAV | 1596 | WO2016081811A1 SEQ ID NO: 58 |
| rAAV | 1597 | WO2016081811A1 SEQ ID NO: 59 |
| rAAV | 1598 | WO2016081811A1 SEQ ID NO: 60 |
| rAAV | 1599 | WO2016081811A1 SEQ ID NO: 61 |
| rAAV | 1600 | WO2016081811A1 SEQ ID NO: 62 |
| rAAV | 1601 | WO2016081811A1 SEQ ID NO: 63 |
| rAAV | 1602 | WO2016081811A1 SEQ ID NO: 64 |
| rAAV | 1603 | WO2016081811A1 SEQ ID NO: 65 |
| rAAV | 1604 | WO2016081811A1 SEQ ID NO: 66 |
| rAAV | 1605 | WO2016081811A1 SEQ ID NO: 67 |
| rAAV | 1606 | WO2016081811A1 SEQ ID NO: 68 |
| rAAV | 1607 | WO2016081811A1 SEQ ID NO: 69 |
| rAAV | 1608 | WO2016081811A1 SEQ ID NO: 70 |
| rAAV | 1609 | WO2016081811A1 SEQ ID NO: 71 |
| rAAV | 1610 | WO2016081811A1 SEQ ID NO: 72 |
| rAAV | 1611 | WO2016081811A1 SEQ ID NO: 73 |
| rAAV | 1612 | WO2016081811A1 SEQ ID NO: 74 |
| rAAV | 1613 | WO2016081811A1 SEQ ID NO: 75 |
| rAAV | 1614 | WO2016081811A1 SEQ ID NO: 76 |
| rAAV | 1615 | WO2016081811A1 SEQ ID NO: 77 |
| rAAV | 1616 | WO2016081811A1 SEQ ID NO: 78 |
| rAAV | 1617 | WO2016081811A1 SEQ ID NO: 79 |
| rAAV | 1618 | WO2016081811A1 SEQ ID NO: 80 |
| rAAV | 1619 | WO2016081811A1 SEQ ID NO: 81 |
| rAAV | 1620 | WO2016081811A1 SEQ ID NO: 82 |
| rAAV | 1621 | WO2016081811A1 SEQ ID NO: 83 |
| rAAV | 1622 | WO2016081811A1 SEQ ID NO: 84 |
| rAAV | 1623 | WO2016081811A1 SEQ ID NO: 85 |
| rAAV | 1624 | WO2016081811A1 SEQ ID NO: 86 |
| rAAV | 1625 | WO2016081811A1 SEQ ID NO: 87 |
| rAAV | 1626 | WO2016081811A1 SEQ ID NO: 88 |
| rAAV | 1627 | WO2016081811A1 SEQ ID NO: 89 |
| rAAV | 1628 | WO2016081811A1 SEQ ID NO: 90 |
| rAAV | 1629 | WO2016081811A1 SEQ ID NO: 91 |
| rAAV | 1630 | WO2016081811A1 SEQ ID NO: 92 |
| rAAV | 1631 | WO2016081811A1 SEQ ID NO: 93 |
| rAAV | 1632 | WO2016081811A1 SEQ ID NO: 94 |
| rAAV | 1633 | WO2016081811A1 SEQ ID NO: 95 |
| rAAV | 1634 | WO2016081811A1 SEQ ID NO: 96 |
| rAAV | 1635 | WO2016081811A1 SEQ ID NO: 97 |
| rAAV | 1636 | WO2016081811A1 SEQ ID NO: 98 |
| rAAV | 1637 | WO2016081811A1 SEQ ID NO: 99 |
| rAAV | 1638 | WO2016081811A1 SEQ ID NO: 100 |
| rAAV | 1639 | WO2016081811A1 SEQ ID NO: 101 |
| rAAV | 1640 | WO2016081811A1 SEQ ID NO: 102 |
| rAAV | 1641 | WO2016081811A1 SEQ ID NO: 103 |
| rAAV | 1642 | WO2016081811A1 SEQ ID NO: 104 |
| rAAV | 1643 | WO2016081811A1 SEQ ID NO: 105 |
| rAAV | 1644 | WO2016081811A1 SEQ ID NO: 106 |
| rAAV | 1645 | WO2016081811A1 SEQ ID NO: 107 |
| rAAV | 1646 | WO2016081811A1 SEQ ID NO: 108 |
| rAAV | 1647 | WO2016081811A1 SEQ ID NO: 109 |
| rAAV | 1648 | WO2016081811A1 SEQ ID NO: 110 |
| rAAV | 1649 | WO2016081811A1 SEQ ID NO: 111 |
| rAAV | 1650 | WO2016081811A1 SEQ ID NO: 112 |
| rAAV | 1651 | WO2016081811A1 SEQ ID NO: 113 |
| rAAV | 1652 | WO2016081811A1 SEQ ID NO: 114 |
| rAAV | 1653 | WO2016081811A1 SEQ ID NO: 115 |
| rAAV | 1654 | WO2016081811A1 SEQ ID NO: 116 |
| rAAV | 1655 | WO2016081811A1 SEQ ID NO: 117 |
| rAAV | 1656 | WO2016081811A1 SEQ ID NO: 118 |
| rAAV | 1657 | WO2016081811A1 SEQ ID NO: 119 |
| rAAV | 1658 | WO2016081811A1 SEQ ID NO: 120 |
| rAAV | 1659 | WO2016081811A1 SEQ ID NO: 121 |
| rAAV | 1660 | WO2016081811A1 SEQ ID NO: 122 |
| rAAV | 1661 | WO2016081811A1 SEQ ID NO: 123 |
| rAAV | 1662 | WO2016081811A1 SEQ ID NO: 124 |
| rAAV | 1663 | WO2016081811A1 SEQ ID NO: 125 |
| rAAV | 1664 | WO2016081811A1 SEQ ID NO: 126 |
| rAAV | 1665 | WO2016081811A1 SEQ ID NO: 127 |
| rAAV | 1666 | WO2016081811A1 SEQ ID NO: 128 |
| AAV8 | 1667 | WO2016081811A1 SEQ ID NO: 133 |
| E532K | | |
| AAV8 | 1668 | WO2016081811A1 SEQ ID NO: 134 |
| E532K | | |
| rAAV4 | 1669 | WO2016115382A1 SEQ ID NO: 2 |
| rAAV4 | 1670 | WO2016115382A1 SEQ ID NO: 3 |
| rAAV4 | 1671 | WO2016115382A1 SEQ ID NO: 4 |
| rAAV4 | 1672 | WO2016115382A1 SEQ ID NO: 5 |
| rAAV4 | 1673 | WO2016115382A1 SEQ ID NO: 6 |
| rAAV4 | 1674 | WO2016115382A1 SEQ ID NO: 7 |
| rAAV4 | 1675 | WO2016115382A1 SEQ ID NO: 8 |
| rAAV4 | 1676 | WO2016115382A1 SEQ ID NO: 9 |
| rAAV4 | 1677 | WO2016115382A1 SEQ ID NO: 10 |
| rAAV4 | 1678 | WO2016115382A1 SEQ ID NO: 11 |
| rAAV4 | 1679 | WO2016115382A1 SEQ ID NO: 12 |
| rAAV4 | 1680 | WO2016145382A1 SEQ ID NO: 13 |
| rAAV4 | 1681 | WO2016115382A1 SEQ ID NO: 14 |
| rAAV4 | 1682 | WO2016115382A1 SEQ ID NO: 15 |
| rAAV4 | 1683 | WO2016115382A1 SEQ ID NO: 16 |
| rAAV4 | 1684 | WO2016115382A1 SEQ ID NO: 17 |
| rAAV4 | 1685 | WO2016145382A1 SEQ ID NO: 18 |
| rAAV4 | 1686 | WO2016115382A1 SEQ ID NO: 19 |
| rAAV4 | 1687 | WO2016115382A1 SEQ ID NO: 20 |
| rAAV4 | 1688 | WO2016115382A1 SEQ ID NO: 21 |
| AAV11 | 1689 | WO2016115382A1 SEQ ID NO: 22 |
| AAV12 | 1690 | WO2016115382A1 SEQ ID NO: 23 |
| rh32 | 1691 | WO2016115382A1 SEQ ID NO: 25 |
| rh33 | 1692 | WO2016115382A1 SEQ ID NO: 26 |
| rh34 | 1693 | WO2016145382A1 SEQ ID NO: 27 |
| rAAV4 | 1694 | WO2016115382A1 SEQ ID NO: 28 |
| rAAV4 | 1695 | WO2016115382A1 SEQ ID NO: 29 |
| rAAV4 | 1696 | WO2016115382A1 SEQ ID NO: 30 |
| rAAV4 | 1697 | WO2016115382A1 SEQ ID NO: 31 |
| rAAV4 | 1698 | WO2016145382A1 SEQ ID NO: 32 |
| rAAV4 | 1699 | WO2016115382A1 SEQ ID NO: 33 |
| AAV2/8 | 1700 | WO2016131981A1 SEQ ID NO: 47 |
| AAV2/8 | 1701 | WO2016131981A1 SEQ ID NO: 48 |
| ancestral | 1702 | WO2016154344A1 SEQ ID NO: 7 |
| AAV | | |
| ancestral | 1703 | WO2016154344A1 SEQ ID NO: 13 |
| AAV variant | | |
| C4 | | |
| ancestral | 1704 | WO2016154344A1 SEQ ID NO: 14 |
| AAV variant | | |
| C7 | | |
| ancestral | 1705 | WO2016154344A1 SEQ ID NO: 15 |
| AAV variant | | |
| G4 | | |
| consensus | 1706 | WO2016154344A1 SEQ ID NO: 16 |
| amino acid | | |
| sequence of | | |
| ancestral | | |
| AAV | | |
| variants, C4. | | |
| C7 and G4 | | |
| consensus | 1707 | WO2016154344A1 SEQ ID NO: 17 |
| amino acid | | |
| sequence of | | |
| ancesiral | | |
| AAV | | |
| variants, C4 | | |
| and C7 | | |
| AAV8 (with | 1708 | WO2016150403A1 SEQ ID NO: 13 |
| a AAV2 | | |
| phospholipase | | |
| domain) | | |
| AAV VR- | 1709 | US20160289275A1 SEQ ID NO: 10 |
| 942n | | |
| AAV5-A | 1710 | US20160289275A1 SEQ ID NO: 13 |
| (M569V) | | |
| AAV5-A | 1711 | US20160289275A1 SEQ ID NO: 14 |
| (M569V) | | |
| AAV5-A | 1712 | US20160289275A1 SEQ ID NO: 16 |
| (Y585V) | | |
| AAV5-A | 1713 | US20160289275A1 SEQ ID NO: 17 |
| (Y585V) | | |
| AAV5-A | 1714 | US20160289275A1 SEQ ID NO: 19 |
| (L587T) | | |
| AAV5-A | 1715 | US20160289275A1 SEQ ID NO: 20 |
| (L587T) | | |
| AAV5-A | 1716 | US20160289275A1 SEQ ID NO: 22 |
| (Y585V/L587T) | | |
| AAV5-A | 1717 | US20160289275A1 SEQ ID NO: 23 |
| (Y585V/L1587T) | | |
| AAV5-B | 1718 | US20160289275A1 SEQ ID NO: 25 |
| (D652A) | | |
| AAV5-B | 1719 | US20160289275A1 SEQ ID NO: 26 |
| (D652A) | | |
| AAV5-B | 1720 | US20160289275A1 SEQ ID NO: 28 |
| (T362M) | | |
| AAV5-B | 1721 | US20160289275A1 SEQ ID NO: 29 |
| (T362M) | | |
| AAV5-B | 1722 | US20160289275A1 SEQ ID NO: 31 |
| (Q359D) | | |
| AAV5-B | 1723 | US20160289275A1 SEQ ID NO: 32 |
| (Q359D) | | |
| AAV5-B | 1724 | US20160289275A1 SEQ ID NO: 34 |
| (E350Q) | | |
| AAV5-B | 1725 | US20160289275A1 SEQ ID NO: 35 |
| (E350Q) | | |
| AAV5-B | 1726 | US20160289275A1 SEQ ID NO: 37 |
| (P533S) | | |
| AAV5-B | 1727 | US20160289275A1 SEQ ID NO: 38 |
| (P5335) | | |
| AAV5-B | 1728 | US20160289275A1 SEQ ID NO: 40 |
| (P533G) | | |
| AAV5-13 | 1729 | US20160289275A1 SEQ ID NO: 41 |
| (P533G) | | |
| AAV5- | 1730 | US20160289275A1 SEQ ID NO: 43 |
| mutation in | | |
| loop VII | | |
| AAV5- | 1731 | US20160289275A1 SEQ ID NO: 44 |
| muiation in | | |
| loop VII | | |
| AAV8 | 1732 | US20160289275A1 SEQ ID NO: 47 |
| Mut A | 1733 | WO2016181123A1 SEQ ID NO: 1 |
| (LK03/AAV8) | | |
| Mut B | 1734 | WO2016181123A1 SEQ ID NO: 2 |
| (LK03/AAV5) | | |
| Mut C | 1735 | WO2016181123A1 SEQ ID NO: 3 |
| (AAV8/AAV3B) | | |
| Mut D | 1736 | WO2016181123A1 SEQ ID NO: 4 |
| (AAV5/AAV3B) | | |
| Mut E | 1737 | WO2016181123A1 SEQ ID NO: 5 |
| (AAV8/AAV3B) | | |
| Mut F | 1738 | WO2016181123A1 SEQ ID NO: 6 |
| (AAV3B/AAV8) | | |
| AAV44.9 | 1739 | WO2016183297A1 SEQ ID NO: 4 |
| AAV44.9 | 1740 | WO2016183297A1 SEQ ID NO: 5 |
| AAVrh8 | 1741 | WO2016183297A1 SEQ ID NO: 6 |
| AAV44.9 | 1742 | WO2016183297A1 SEQ ID NO: 9 |
| (S470N) | | |
| rh74 VP1 | 1743 | US20160375110A1 SEQ ID NO: 1 |
| AAV-LK03 | 1744 | WO2017015102A1 SEQ ID NO: 5 |
| (L125I) | | |
| AAV3B | 1745 | WO2017015102A1 SEQ ID NO: 6 |
| (S663V + T492V) | | |
| Anc80 | 1746 | WO2017019994A2 SEQ ID NO: 1 |
| Anc80 | 1747 | WO2017019994A2 SEQ ID NO: 2 |
| Anc81 | 1748 | WO2017019994A2 SEQ ID NO: 3 |
| Anc81 | 1749 | WO2017019994A2 SEQ ID NO: 4 |
| Anc82 | 1750 | WO2017019994A2 SEQ ID NO: 5 |
| Anc82 | 1751 | WO2017019994A2 SEQ ID NO: 6 |
| Anc83 | 1752 | WO2017019994A2 SEQ ID NO: 7 |
| Anc83 | 1753 | WO2017019994A2 SEQ ID NO: 8 |
| Anc84 | 1754 | WO2017019994A2 SEQ ID NO: 9 |
| Anc84 | 1755 | WO2017019994A2 SEQ ID NO: 10 |
| Anc94 | 1756 | WO2017019994A2 SEQ ID NO: 11 |
| Anc94 | 1757 | WO2017019994A2 SEQ ID NO: 12 |
| Anc113 | 1758 | WO2017019994A2 SEQ ID NO: 13 |
| Anc113 | 1759 | WO2017019994A2 SEQ ID NO: 14 |
| Anc126 | 1760 | WO2017019994A2 SEQ ID NO: 15 |
| Anc126 | 1761 | WO2017019994A2 SEQ ID NO: 16 |
| Anc127 | 1762 | WO2017019994A2 SEQ ID NO: 17 |
| Anc127 | 1763 | WO2017019994A2 SEQ ID NO: 18 |
| Anc80L27 | 1764 | WO2017019994A2 SEQ ID NO: 19 |
| Anc80L59 | 1765 | WO2017019994A2 SEQ ID NO: 20 |
| Anc80L60 | 1766 | WO2017019994A2 SEQ ID NO: 21 |
| Anc80L62 | 1767 | WO2017019994A2 SEQ ID NO: 22 |
| Anc80L65 | 1768 | WO2017019994A2 SEQ ID NO: 23 |
| Anc80L33 | 1769 | WO2017019994A2 SEQ ID NO: 24 |
| Anc80L36 | 1770 | WO2017019994A2 SEQ ID NO: 25 |
| Anc80L44 | 1771 | WO2017019994A2 SEQ ID NO: 26 |
| Anc80L1 | 1772 | WO2017019994A2 SEQ ID NO: 35 |
| Anc80L1 | 1773 | WO2017019994A2 SEQ ID NO: 36 |
| AAVrh10 | 1774 | WO2017019994A2 SEQ ID NO: 41 |
| Anc110 | 1775 | WO2017019994A2 SEQ ID NO: 42 |
| Anc110 | 1776 | WO2017019994A2 SEQ ID NO: 43 |
| AAVrh32.33 | 1777 | WO2017019994A2 SEQ ID NO: 45 |
| AAVrh74 | 1778 | WO2017049031A1 SEQ ID NO: 1 |
| AAV2 | 1779 | WO2017053629A2 SEQ ID NO: 49 |
| AAV2 | 1780 | WO2017053629A2 SEQ ID NO: 50 |
| AAV2 | 1781 | WO2017053629A2 SEQ ID NO: 82 |
| Parvo-like | 1782 | WO2017070476A2 SEQ ID NO: 1 |
| virus | | |
| Parvo-like | 1783 | WO2017070476A2 SEQ ID NO: 2 |
| virus | | |
| Parvo-like | 1784 | WO2017070476A2 SEQ ID NO: 3 |
| virus | | |
| Parvo-like | 1785 | WO2017070476A2 SEQ ID NO: 4 |
| virus | | |
| Parvo-like | 1786 | WO2017070476A2 SEQ ID NO: 5 |
| virus | | |
| Parvo-like | 1787 | WO2017070476A2 SEQ ID NO: 6 |
| virus | | |
| AAVrh.10 | 1788 | WO2017070516A1 SEQ ID NO: 7 |
| AAVrh.10 | 1789 | WO2017070516A1 SEQ ID NO: 14 |
| AAV2tYF | 1790 | WO2017070491A1 SEQ ID NO: 1 |
| AAV-SPK | 1791 | WO2017075619A1 SEQ ID NO:28 |
| AAV2.5 | 1792 | US20170128528A1 SEQ ID NO: 13 |
| AAV1.1 | 1793 | US20170128528A1 SEQ ID NO: 15 |
| A AV6.1 | 1794 | US20170128528A1 SEQ ID NO: 17 |
| AAV6.3.1 | 1795 | US20170128528A1 SEQ ID NO: 18 |
| AAV2i8 | 1796 | US20170128528A1 SEQ ID NO: 28 |
| AAV2i8 | 1797 | US20170128528A1 SEQ ID NO: 29 |
| ttAAV | 1798 | US201701.28528A1 SEQ ID NO: 30 |
| ttAAV- | 1799 | US20170128528A1 SEQ ID NO: 32 |
| S312N | | |
| ttAAV- | 1800 | US20170128528A1 SEQ ID NO: 33 |
| S312N | | |
| AAV6 | 1801 | WO2016134337A1 SEQ ID NO: 24 |
| (Y705, Y731, | | |
| and T492) | | |
| AAV2 | 1802 | WO2016134375A1 SEQ ID NO: 9 |
| AAV2 | 1803 | WO2016134375A1 SEQ ID NO: 10 |

[0098] Each of the patents, applications and/or publications listed in Table 1 are hereby incorporated by reference in their entirety.

[0099] In one embodiment, the AAV serotype may be, or may have a sequence as described in International Patent Publication WO2015038958, the contents of which are herein incorporated by reference in their entirety, such as, but not limited to, AAV9 (SEQ ID NO: 2 and 11 of WO2015038958 or SEQ ID NO: 127 and 126 respectively herein), PHP.B (SEQ ID NO: 8 and 9 of WO2015038958, herein SEQ ID NO: 868 and 869). G2B-13 (SEQ ID NO: 12 of WO2015038958, herein SEQ ID NO: 870), G2B-26 (SEQ ID NO: 13 of WO2015038958, herein SEQ ID NO: 868 and 869), TH1.1-32 (SEQ ID NO: 14 of WO2015038958, herein SEQ ID NO: 871), TH1.1-35 (SEQ ID NO: 15 of WO2015038958, herein SEQ ID NO: 872) or variants thereof. Further, any of the targeting peptides or amino acid inserts described in WO2015038958, may be inserted into any parent AAV serotype, such as, but not limited to, AAV9 (SEQ ID NO: 126 for the DNA sequence and SEQ ID NO: 127 for the amino acid sequence). In one embodiment, the amino acid insert is inserted between amino acids 586-592 of the parent AAV (e.g., AAV9). In another embodiment, the amino acid insert is inserted between amino acids 588-589 of the parent AAV sequence. The amino acid insert may be, but is not limited to, any of the following amino acid sequences, TLAVPFK (SEQ ID NO: 1 of WO2015038958; herein SEQ ID NO: 873), KFPVALT (SEQ ID NO: 3 of WO2015038958; herein SEQ ID NO: 874), LAVPFK (SEQ ID NO: 31 of WO2015038958; herein SEQ ID NO: 875), AVPFK (SEQ ID NO: 32 of WO2015038958; herein SEQ ID NO: 876), VPFK (SEQ ID NO: 33 of WO2015038958; herein SEQ ID NO: 877), TLAVPF (SEQ ID NO: 34 of WO2015038958; herein SEQ ID NO: 878), TLAVP (SEQ ID NO: 35 of WO2015038958; herein SEQ ID NO: 879), TLAV (SEQ ID NO: 36 of WO2015038958; herein SEQ ID NO: 880), SVSKPFL (SEQ ID NO: 28 of WO02015038958; herein SEQ ID NO: 881), FTLTTPK (SEQ ID NO: 29 of WO2015038958; herein SEQ ID NO: 882), MNATKNV (SEQ ID NO: 30 of WO02015038958; herein SEQ ID NO: 883), QSSQTPR (SEQ ID NO: 54 of WO2015038958; herein SEQ ID NO: 884), ILGTGTS (SEQ ID NO: 55 of WO2015038958; herein SEQ ID NO: 885), TRTNPEA (SEQ ID NO: 56 of WO2015038958; herein SEQ ID NO: 886), NGGTSSS (SEQ ID NO: 58 of WO2015038958; herein SEQ ID NO: 887), or YTLSQGW (SEQ ID NO: 60 of WO2015038958; herein SEQ ID NO: 888), Non-limiting examples of nucleotide sequences that may encode the amino acid inserts include the following, AAGTTTCCTGTGGCGTTGACT (for SEQ ID NO: 3 of WO2015038958; herein SEQ ID NO: 889), ACTTTGGCGGTGCCTTTTAAG (SEQ ID NO: 24 and 49 of WO2015038958; herein SEQ ID NO: 890), AGTGTGAGTAAGCCTTTTTTG (SEQ ID NO: 25 of WO2015038958; herein SEQ ID NO: 891), TTTACGTTGACGACGCCTAAG (SEQ ID NO: 26 of WO2015038958; herein SEQ ID NO: 892), ATGAATGCTACGAAGAATGTG (SEQ ID NO: 27 of WO2015038958; herein SEQ ID NO: 893), CAGTCGTCGCAGACGCCTAGG (SEQ ID NO: 48 of WO2015038958; herein SEQ ID NO: 894), ATTCTGGGACTGGTACTTCG (SEQ ID NO: 50 and 52 of WO2015038958; herein SEQ ID NO: 895), ACGCGGACTAATCCTGAGGCT (SEQ ID NO: 51 of WO2015038958; herein SEQ ID NO: 896), AATGGGGGGACTAGTAGTTCT (SEQ ID NO: 53 of WO2015038958; herein SEQ ID NO: 897), or TATACTTTGTCGCAGGGTTGG (SEQ ID NO: 59 of WO2015038958; herein SEQ ID NO: 898).

[0100] In one embodiment, the AAV serotype may be engineered to comprise at least one AAV capsid CD8+ T-cell epitope for AAV2 such as, but not limited to, SADNNNSEY (SEQ ID NO: 899), LIDQYLYYL (SEQ ID NO: 900), VPQYGYLTL (SEQ ID NO: 901), TTSTRTWAL (SEQ ID NO: 902), YHLNGRDSL (SEQ ID NO: 903), SQAVGRSSF (SEQ ID NO: 904), VPANPSTTF (SEQ ID NO: 905), FPQSGVLIF (SEQ ID NO: 906), YFDFNRFHCHFSPRD (SEQ ID NO: 907), VGNSSGNWHCDSTWM (SEQ ID NO: 908), QFSQAGASDIRDQSR (SEQ ID NO: 909), GASDIRQSRNWLP (SEQ ID NO: 910) and GNRQAATADVNTQGV (SEQ ID NO: 911).

[0101] In one embodiment, the AAV serotype may be engineered to comprise at least one AAV capsid CD8+ T-cell epitope for AAV1 such as, but not limited to, LDRLMNPLI (SEQ ID NO: 912), TTSTRTWAL (SEQ ID NO: 902), and QPAKKRLNF (SEQ ID NO: 913)).

[0102] In one embodiment, the AAV serotype may be, or may have a sequence as described in International Patent Publication WO02017100671, the contents of which are herein incorporated by reference in their entirety, such as, but not limited to, AAV9 (SEQ ID NO: 45 of WO2017100671, herein SEQ ID NO: 1420), PHP.N (SEQ ID NO: 46 of WO2017100671, herein SEQ ID NO: 1418), PHP.S (SEQ ID NO: 47 of WO2017100671, herein SEQ ID NO: 1419), or variants thereof. Further, any of the targeting peptides or amino acid inserts described in WO2017100671 may be inserted into any parent AAV serotype, such as, but not limited to, AAV9 (SEQ ID NO: 127 or SEQ ID NO: 1420). In one embodiment, the amino acid insert is inserted between amino acids 586-592 of the parent AAV (e.g., AAV9). In another embodiment, the amino acid insert is inserted between amino acids 588-589 of the parent AAV sequence. The amino acid insert may be, but is not limited to, any of the following amino acid sequences, AQTLAVPFKAQ (SEQ ID NO: 1 of WO2017100671; herein SEQ ID NO: 1804), AQSVSKPFLAQ (SEQ ID NO: 2 of WO2017100671; herein SEQ ID NO: 1805), AQFTLTTPKAQ (SEQ ID NO: 3 in the sequence listing of WO2017100671; herein SEQ ID NO: 1806), DGTLAVPFKAQ (SEQ ID NO: 4 in the sequence listing of WO2017100671; herein SEQ ID NO: 1807), ESTLAVPFKAQ (SEQ ID NO: 5 of WO2017100671; herein SEQ ID NO: 1808), GGTLAVPFKAQ (SEQ ID NO: 6 of WO2017100671; herein SEQ ID NO: 1809), AQTLATPFKAQ (SEQ ID NO: 7 and 33 of WO2017100671; herein SEQ ID NO: 1810), ATTLATPFKAQ (SEQ ID NO: 8 of WO2017100671; herein SEQ ID NO: 1811), DGTLATPFKAQ (SEQ ID NO: 9 of WO2017100671; herein SEQ ID NO: 1812), GGTLATPFKAQ (SEQ ID NO: 10 of WO2017100671; herein SEQ ID NO: 1813), SGSLAVPFKAQ (SEQ ID NO: 11 of WO2017100671; herein SEQ ID NO: 1814), AQTLAQPFKAQ (SEQ ID NO: 12 of WO2017100671; herein SEQ ID NO: 1815), AQTLQQPFKAQ (SEQ ID NO: 13 of WO2017100671; herein SEQ ID NO: 1816), AQTLSNPFKAQ (SEQ ID NO: 14 of WO2017100671; herein SEQ ID NO: 1817), AQTLAVPFSNP (SEQ ID NO: 15 of WO2017100671; herein SEQ ID NO: 1818), QGTLAVPFKAQ (SEQ ID NO: 16 of WO2017100671; herein SEQ ID NO: 1819), NQTLAVPFKAQ (SEQ ID NO: 17 of WO2017100671; herein SEQ ID NO: 1820), EGSLAVPFKAQ (SEQ ID NO: 18 of WO2017100671; herein SEQ ID NO: 1821), SGNLAVPFKAQ (SEQ ID NO: 19 of WO2017100671; herein SEQ ID NO: 1822), EGTLAVPFKAQ (SEQ ID NO: 20 of WO2017100671; herein SEQ ID NO: 1823), DSTLAVPFKAQ (SEQ ID NO: 21 in Table 1 of WO2017100671; herein SEQ ID NO: 1824), AVTLAVPFKAQ (SEQ ID NO: 22 of WO2017100671; herein SEQ ID NO: 1825), AQTLSTPFKAQ (SEQ ID NO: 23 of WO2017100671; herein SEQ ID NO: 1826), AQTLPQPFKAQ (SEQ ID NO: 24 and 32 of WO2017100671; herein SEQ ID NO: 1827), AQTLSQPFKAQ (SEQ ID NO: 25 of WO2017100671; herein SEQ ID NO: 1828), AQTLQLPFKAQ (SEQ ID NO: 26 of WO2017100671; herein SEQ ID NO: 1829), AQTLTMPFKAQ (SEQ ID NO: 27, and 34 of WO2017100671 and SEQ ID NO: 35 in the sequence listing of WO2017100671; herein SEQ ID NO: 1830), AQTLTTPFKAQ (SEQ ID NO: 28 of WO2017100671; herein SEQ ID NO: 1831), AQYTLSQGWAQ (SEQ ID NO: 29 of WO2017100671; herein SEQ ID NO: 1832), AQMNATKNVAQ (SEQ ID NO: 30 of WO2017100671; herein SEQ ID NO: 1833), AQVSGGHHSAQ (SEQ ID NO: 31 of WO2017100671; herein SEQ ID NO: 1834), AQTLTAPFKAQ (SEQ ID NO: 35 in Table 1 of WO2017100671; herein SEQ ID NO: 1835), AQTLSKPFKAQ (SEQ ID NO: 36 of WO2017100671; herein SEQ ID NO: 1836), QAVRTSL (SEQ ID NO: 37 of WO2017100671; herein SEQ ID NO: 1837), YTLSQGW (SEQ ID NO: 38 of WO2017100671; herein SEQ ID NO: 888), LAKERLS (SEQ ID NO: 39 of WO2017100671, herein SEQ ID NO: 1838), TLAVPFK (SEQ ID NO: 40 in the sequence listing of WO2017100671; herein SEQ ID NO: 873), SVSKPFL (SEQ ID NO: 41 of WO2017100671; herein SEQ ID NO: 881), FTLTTPK (SEQ ID NO: 42 of WO2017100671; herein SEQ ID NO: 882), MNSTKNV (SEQ ID NO: 43 of WO2017100671; herein SEQ ID NO: 1839), VSGGHHS (SEQ ID NO: 44 of WO02017100671: herein SEQ ID NO: 1840), SAQTLAVPFKAQAQ (SEQ ID NO: 48 of WO2017100671; herein SEQ ID NO: 1841), SXXXLAVPFKAQAQ (SEQ ID NO: 49 of WO2017100671 wherein X may be any amino acid; herein SEQ ID NO: 1842), SAQXXXVPFKAQAQ (SEQ ID NO: 50 of WO2017100671 wherein X may be any amino acid; herein SEQ ID NO: 1843), SAQTLXXXFKAQAQ (SEQ ID NO: 51 of WO2017100671 wherein X may be any amino acid; herein SEQ ID NO: 1844), SAQTLAVXXXAQAQ (SEQ ID NO: 52 of WO2017100671 wherein X may be any amino acid; herein SEQ ID NO: 1845), SAQTLAVPFXXXAQ (SEQ ID NO: 53 of WO2017100671 wherein X may be any amino acid; herein SEQ ID NO: 1846), TNHQSAQ (SEQ ID NO: 65 of WO2017100671; herein SEQ ID NO: 1847), AQAQTGW (SEQ ID NO: 66 of WO2017100671; herein SEQ ID NO: 1848), DGTLATPFK (SEQ ID NO: 67 of WO2017100671; herein SEQ ID NO: 1849), DGTLATPFKXX (SEQ ID NO: 68 of WO2017100671 wherein X may be any amino acid; herein SEQ ID NO: 1850), LAVPFKAQ (SEQ ID NO: 80 of WO2017100671; herein SEQ ID NO: 1851), VPFKAQ (SEQ ID NO: 81 of WO2017100671; herein SEQ ID NO: 1852), FKAQ (SEQ ID NO: 82 of WO2017100671; herein SEQ ID NO: 1853), AQTLAV (SEQ ID NO: 83 of WO2017100671; herein SEQ ID NO: 1854), AQTLAVPF (SEQ ID NO: 84 of WO2017100671; herein SEQ ID NO: 1855), QAVR (SEQ ID NO: 85 of WO2017100671; herein SEQ ID NO: 1856), AVRT (SEQ ID NO: 86 of WO2017100671, herein SEQ ID NO: 1857), VRTS (SEQ ID NO: 87 of WO2017100671; herein SEQ ID NO: 1858), RTSL (SEQ ID NO: 88 of WO2017100671; herein SEQ ID NO: 1859), QAVRT (SEQ ID NO: 89 of WO2017100671; herein SEQ ID NO: 1860), AVRTS (SEQ ID NO: 90 of WO2017100671; herein SEQ ID NO: 1861), VRTSL (SEQ ID NO: 91 of WO2017100671; herein SEQ ID NO: 1862), QAVRTS (SEQ ID NO: 92 of WO2017100671; herein SEQ ID NO: 1863), or AVRTSL (SEQ ID NO: 93 of WO2017100671; herein SEQ ID NO: 1864).

[0103] Non-limiting examples of nucleotide sequences that may encode the amino acid inserts include the following, GATGGGACTTTGGCGGTGCCTTTAAGGCACAG (SEQ ID NO: 54 of WO2017100671; herein SEQ ID NO: 1865), GATGGGACGTTGGCGGTGCCTTTTAAGGCACAG (SEQ ID NO: 55 of WO2017100671; herein SEQ ID NO: 1866), CAGGCGGTTAGGACGTCTTTG (SEQ ID NO: 56 of WO2017100671; herein SEQ ID NO: 1867), CAGGTCTCACGGACTCAGACTATCAG (SEQ ID NO: 57 and 78 of WO2017100671; herein SEQ ID NO: 1868), CAAGTAAAACCTCTACAAATGTGGTAAAATCG (SEQ ID NO: 58 of WO2017100671 herein SEQ ID NO: 1869), ACTCATCGACCAATACTTGTACTATCTCTCTAGAAC (SEQ ID NO: 59 of WO2017100671; herein SEQ ID NO: 1870), GGAAGTATTCCTTGGTTTGAACCCA (SEQ ID NO: 60 of WO2017100671; herein SEQ ID NO: 1871), GGTCGCGGTTCTTGTTTGTGGAT (SEQ ID NO: 61 of WO2017100671; herein SEQ ID NO: 1872), CGACCTTGAAGCGCATGAACTCCT (SEQ ID NO: 62 of WO2017100671; herein SEQ ID NO: 1873), GTATTCCTGGTTTTGAACCCAACCGGTCTGCGCCTGTGCMNNMNNMNNMNNMNN MNNMNNTTGGGCACTCTGGTGGTTTGTC (SEQ ID NO: 63 of WO2017100671 wherein N may be A, C, T, or G; herein SEQ ID NO: 1874), GTATTCCTTGGTTTGAACCCAACCGGTCTGCGCMNNMNNMNNAAAAGGCACCGCC AAAGTTTG (SEQ ID NO: 69 of WO2017100671 wherein N may be A, C, T, or G; herein SEQ ID NO: 1875), GTATTCCTTGGTTTTGAACCCAACCGGTCTGCGCCTGTGCMNNMNNMNNCACCGCC AAAGTTTGGGCACT (SEQ ID NO: 70 of WO2017100671 wherein N may be A, C, T, or G: herein SEQ ID NO: 1876), GTATCCTTTGGTTTTGAACCCAACCGGTCTGCGCCTGTGCCTTAAAMNNMNNMNNC AAAGTTTTGGGCACTCTGGTGG (SEQ ID NO: 71 of WO2017100671 wherein N may be A, C, T, or G; herein SEQ ID NO: 1877), GTATTCCTTGGTTTGAACCCAACCGGTCTGCGCCTGTGCCTTAAAAGGCACMNNM NNMNNTTGGGCACTCTGGTGGTTTGTG (SEQ ID NO: 72 of WO2017100671 wherein N may be A, C, T, or G; herein SEQ ID NO: 1878), ACTTTGGCGGTGCCITTTAAG (SEQ ID NO: 74 of WO2017100671; herein SEQ ID NO: 890), AGTGTGAGTAAGCCTTTTTG (SEQ ID NO: 75 of WO2017100671; herein SEQ ID NO: 891), TTTACGTTGACGACGCCTAAG (SEQ ID NO: 76 of WO2017100671; herein SEQ ID NO: 892), TATACTTTGTCGCAGGTTGG (SEQ ID NO: 77 of WO2017100671; herein SEQ ID NO: 898), or CTTGCGAAGGAGCGGCTTTCG (SEQ ID NO: 79 of WO2017100671; herein SEQ ID NO: 1879).

[0104] In one embodiment, the AAV serotype may be, or may have a sequence as described in U.S. Pat. No. 9,624,274, the contents of which are herein incorporated by reference in their entirety, such as, but not limited to, AAV1 (SEQ ID NO: 181 of U.S. Pat. No. 9,624,274), AAV6 (SEQ ID NO: 182 of U.S. Pat. No. 9,624,274), AAV2 (SEQ ID NO: 183 of U.S. Pat. No. 9,624,274), AAV3b (SEQ ID NO: 184 of U.S. Pat. No. 9,624,274), AAV7 (SEQ ID NO: 185 of U.S. Pat. No. 9,624,274), AAV8 (SEQ ID NO: 186 of U.S. Pat. No. 9,624,274), AAV100 (SEQ ID NO: 187 of U.S. Pat. No. 9,624,274), AAV4 (SEQ ID NO: 188 of U.S. Pat. No. 9,624,274), AAV11 (SEQ ID NO: 189 of U.S. Pat. No. 9,624,274), bAAV (SEQ ID NO: 190 of U.S. Pat. No. 9,624,274), AAV5 (SEQ ID NO: 191 of U.S. Pat. No. 9,624,274), GPV (SEQ ID NO: 192 of U.S. Pat. No. 9,624,274; herein SEQ ID NO: 1421), B19 (SEQ ID NO: 193 of U.S. Pat. No. 9,624,274; herein SEQ ID NO: 1422), MVM (SEQ ID NO: 194 of U.S. Pat. No. 9,624,274; herein SEQ ID NO: 1423), FPV (SEQ ID NO: 195 of U.S. Pat. No. 9,624,274; herein SEQ ID NO: 1424), CPV (SEQ ID NO: 196 of U.S. Pat. No. 9,624,274; herein SEQ ID NO: 1425) or variants thereof. Further, any of the structural protein inserts described in U.S. Pat. No. 9,624,274, may be inserted into, but not limited to, I-453 and I-587 of any parent AAV serotype, such as, but not limited to, AAV2 (SEQ ID NO: 183 of U.S. Pat. No. 9,624,274). The amino acid insert may be, but is not limited to, any of the following amino acid sequences, VNLTWSRASG (SEQ ID NO: 50 of U.S. Pat. No. 9,624,274; herein SEQ ID NO: 1880), EFCINHRGYWVCGD (SEQ ID NO:55 of U.S. Pat. No. 9,624,274; herein SEQ ID NO: 1881), EDGQVMDVDLS (SEQ ID NO: 85 of U.S. Pat. No. 9,624,274: herein SEQ ID NO: 1882), EKQRNGTLT (SEQ ID NO: 86 of U.S. Pat. No. 9,624,274; herein SEQ ID NO: 1883), TYQCRVTHPHLPRALMR (SEQ ID NO: 87 of U.S. Pat. No. 9,624,274 herein SEQ ID NO: 1884), RHSTTQPRKTKGSG (SEQ ID NO: 88 of U.S. Pat. No. 9,624,274; herein SEQ ID NO: 1885), DSNPRGVSAYLSR (SEQ ID NO: 89 of U.S. Pat. No. 9,624,274; herein SEQ ID NO: 1886), TITCLWDLAPSK (SEQ ID NO: 90 of U.S. Pat. No. 9,624,274; herein SEQ ID NO: 1887), KTKGSGFFVF (SEQ ID NO: 91 of U.S. Pat. No. 9,624,274; herein SEQ ID NO: 1888), THPHLPRALMRS (SEQ ID NO: 92 of U.S. Pat. No. 9,624,274; herein SEQ ID NO: 1889), GETYQCRVTHPHLPRALMRSTTK (SEQ ID NO: 93 of U.S. Pat. No. 9,624,274; herein SEQ ID NO: 1890), LPRALMRS (SEQ ID NO: 94 of U.S. Pat. No. 9,624,274; herein SEQ ID NO: 1891), INHRGYWV (SEQ ID NO: 95 of U.S. Pat. No. 9,624,274; herein SEQ ID NO: 1892), CDAGSVRTNAPD (SEQ ID NO: 60 of U.S. Pat. No. 9,624,274; herein SEQ ID NO: 1893), AKAVSNLTESRSESLQS (SEQ ID NO: 96 of U.S. Pat. No. 9,624,274; herein SEQ ID NO: 1894), SLTGDEFKKVLET (SEQ ID NO: 97 of U.S. Pat. No. 9,624,274; herein SEQ ID NO: 1895), REAVAYRFEED (SEQ ID NO: 98 of U.S. Pat. No. 9,624,274; herein SEQ ID NO: 1896), INPEIITLDG (SEQ ID NO: 99 of U.S. Pat. No. 9,624,274; herein SEQ ID NO: 1897), DISVTGAPVITATYL (SEQ ID NO: 100 of U.S. Pat. No. 9,624,274; herein SEQ ID NO: 1898), DISVTGAPVITA (SEQ ID NO: 101 of U.S. Pat. No. 9,624,274; herein SEQ ID NO: 1899), PKTVSNLTESSSESVQS (SEQ ID NO: 102 of U.S. Pat. No. 9,624,274; herein SEQ ID NO: 1900), SLMGDEFKAVLET (SEQ ID NO: 103 of U.S. Pat. No. 9,624,274; herein SEQ ID NO: 1901), QHSVAYTFEED (SEQ ID NO: 104 of U.S. Pat. No. 9,624,274; herein SEQ ID NO: 1902), INPEIITRDG (SEQ ID NO: 105 of U.S. Pat. No. 9,624,274; herein SEQ ID NO: 1903), DISLTGDPVITASYL (SEQ ID NO: 106 of U.S. Pat. No. 9,624,274; herein SEQ ID NO: 1904), DISLTGDPVITA (SEQ ID NO: 107 of U.S. Pat. No. 9,624,274; herein SEQ ID NO: 1905), DQSIDFEIDSA (SEQ ID NO: 108 of U.S. Pat. No. 9,624,274; herein SEQ ID NO: 1906), KNVSEDLPLPTFSPTLLGDS (SEQ ID NO: 109 of U.S. Pat. No. 9,624,274; herein SEQ ID NO: 1907), KNVSEDLPLPT (SEQ ID NO: 110 of U.S. Pat. No. 9,624,274; herein SEQ ID NO: 1908), CDSGRVRTDAPD (SEQ ID NO: 111 of U.S. Pat. No. 9,624,274; herein SEQ ID NO: 1909), FPEHLLVDFLQSLS (SEQ ID NO: 112 of U.S. Pat. No. 9,624,274; herein SEQ ID NO: 1910), DAEFRHDSG (SEQ ID NO: 65 of U.S. Pat. No. 9,624,274; herein SEQ ID NO: 1911), HYAAAQWDFGNTMCQL (SEQ ID NO: 113 of U.S. Pat. No. 9,624,274; herein SEQ ID NO: 1912), YAAQWDFGNTMCQ (SEQ ID NO: 114 of U.S. Pat. No. 9,624,274; herein SEQ ID NO: 1913), RSQKEGLHYT (SEQ ID NO: 115 of U.S. Pat. No. 9,624,274; herein SEQ ID NO: 1914), SSRTPSDKPVAHWANPQAE (SEQ ID NO: 116 of U.S. Pat. No. 9,624,274; herein SEQ ID NO: 1915), SRTPSDKPVAHWANP (SEQ ID NO: 117 of U.S. Pat. No. 9,624,274; herein SEQ ID NO: 1916), SSRTPSDKP (SEQ ID NO: 118 of U.S. Pat. No. 9,624,274; herein SEQ ID NO: 1917), NADGNVDYHMNSVP (SEQ ID NO: 119 of U.S. Pat. No. 9,624,274; herein SEQ ID NO: 1918), DGNVDYHMNSV (SEQ ID NO: 120 of U.S. Pat. No. 9,624,274; herein SEQ ID NO: 1919), RSFKEFLQSSLRALRQ (SEQ ID NO: 121 of U.S. Pat. No. 9,624,274; herein SEQ ID NO: 1920); FKEFLQSSLRA (SEQ ID NO: 122 of U.S. Pat. No. 9,624,274; herein SEQ ID NO: 1921), or QMWAPQWGPD (SEQ ID NO: 123 of U.S. Pat. No. 9,624,274; herein SEQ ID NO: 1922).

[0105] In one embodiment, the AAV serotype may be, or may have a sequence as described in U.S. Pat. No. 9,475,845, the contents of which are herein incorporated by reference in their entirety, such as, but not limited to, AAV capsid proteins comprising modification of one or more amino acids at amino acid positions 585 to 590 of the native AAV2 capsid protein. Further the modification may result in, but not limited to, the amino acid sequence RGNRQA (SEQ ID NO: 3 of U.S. Pat. No. 9,475,845; herein SEQ ID NO: 1923), SSSTDP (SEQ ID NO: 4 of U.S. Pat. No. 9,475,845; herein SEQ ID NO: 1924), SSNTAP (SEQ ID NO: 5 of U.S. Pat. No. 9,475,845: herein SEQ ID NO: 1925), SNSNLP (SEQ ID NO: 6 of U.S. Pat. No. 9,475,845; herein SEQ ID NO: 1926), SSTTAP (SEQ ID NO: 7 of U.S. Pat. No. 9,475,845; herein SEQ ID NO: 1927), AANTAA (SEQ ID NO: 8 of U.S. Pat. No. 9,475,845; herein SEQ ID NO: 1928), QQNTAP (SEQ ID NO: 9 of U.S. Pat. No. 9,475,845; herein SEQ ID NO: 1929), SAQAQA (SEQ ID NO: 10 of U.S. Pat. No. 9,475,845; herein SEQ ID NO: 1930), QANTGP (SEQ ID NO: 11 of U.S. Pat. No. 9,475,845; herein SEQ ID NO: 1931), NATTAP (SEQ ID NO: 12 of U.S. Pat. No. 9,475,845; herein SEQ ID NO: 1932), SSTAGP (SEQ ID NO: 13 and 20 of U.S. Pat. No. 9,475,845; herein SEQ ID NO: 1933), QQNTAA (SEQ ID NO: 14 of U.S. Pat. No. 9,475,845; herein SEQ ID NO: 1934), PSTAGP (SEQ ID NO: 15 of U.S. Pat. No. 9,475,845; herein SEQ ID NO: 1935), NQNTAP (SEQ ID NO: 16 of U.S. Pat. No. 9,475,845; herein SEQ ID NO: 1936), QAANAP (SEQ ID NO: 17 of U.S. Pat. No. 9,475,845; herein SEQ ID NO: 1937), SIVGLP (SEQ ID NO: 18 of U.S. Pat. No. 9,475,845; herein SEQ ID NO: 1938), AASTAA (SEQ ID NO: 19, and 27 of U.S. Pat. No. 9,475,845; herein SEQ ID NO: 1939), SQNTTA (SEQ ID NO: 21 of U.S. Pat. No. 9,475,845; herein SEQ ID NO: 1940), QQDTAP (SEQ ID NO: 22 of U.S. Pat. No. 9,475,845; herein SEQ ID NO: 1941), QTNTGP (SEQ ID NO: 23 of U.S. Pat. No. 9,475,845; herein SEQ ID NO: 1942), QTNGAP (SEQ ID NO: 24 of U.S. Pat. No. 9,475,845; herein SEQ ID NO: 1943), QQNAAP (SEQ ID NO: 25 of U.S. Pat. No. 9,475,845; herein SEQ ID NO: 1944), or AANTQA (SEQ ID NO: 26 of U.S. Pat. No. 9,475,845; herein SEQ ID NO: 1945). In one embodiment, the amino acid modification is a substitution at amino acid positions 262 through 265 in the native AAV2 capsid protein or the corresponding position in the capsid protein of another AAV with a targeting sequence. The targeting sequence may be, but is not limited to, any of the amino acid sequences, NGRAHA (SEQ ID NO: 38 of U.S. Pat. No. 9,475,845; herein SEQ ID NO: 1946), QPEHSST (SEQ ID NO: 39 and 50 of U.S. Pat. No. 9,475,845; herein SEQ ID NO: 1947), VNTANST (SEQ ID NO: 40 of U.S. Pat. No. 9,475,845; herein SEQ ID NO: 1948), HGPMQKS (SEQ ID NO: 41 of U.S. Pat. No. 9,475,845; herein SEQ ID NO: 1949), PHKPPLA (SEQ ID NO: 42 of U.S. Pat. No. 9,475,845; herein SEQ ID NO: 1950), IKNNEMW (SEQ ID NO: 43 of U.S. Pat. No. 9,475,845; herein SEQ ID NO: 1951), RNLDTPM (SEQ ID NO: 44 of U.S. Pat. No. 9,475,845; herein SEQ ID NO: 1952), VDSHRQS (SEQ ID NO: 45 of U.S. Pat. No. 9,475,845; herein SEQ ID NO: 1953), YDSKTKT (SEQ ID NO: 46 of U.S. Pat. No. 9,475,845; herein SEQ ID NO: 1954), SQLPHQK (SEQ ID NO: 47 of U.S. Pat. No. 9,475,845; herein SEQ ID NO: 1955), STMQQNT (SEQ ID NO: 48 of U.S. Pat. No. 9,475,845; herein SEQ ID NO: 1956), TERYMTQ (SEQ ID NO: 49 of U.S. Pat. No. 9,475,845; herein SEQ ID NO: 1957), DASLSTS (SEQ ID NO: 51 of U.S. Pat. No. 9,475,845; herein SEQ ID NO: 1958), DLPNKKT (SEQ ID NO: 52 of U.S. Pat. No. 9,475,845; herein SEQ ID NO: 1959), DLTAARL (SEQ ID NO: 53 of U.S. Pat. No. 9,475,845; herein SEQ ID NO: 1960), EPHQFNY (SEQ ID NO: 54 of U.S. Pat. No. 9,475,845; herein SEQ ID NO: 1961), EPQSNHT (SEQ ID NO: 55 of U.S. Pat. No. 9,475,845; herein SEQ ID NO: 1962), MSSWPSQ (SEQ ID NO: 56 of U.S. Pat. No. 9,475,845; herein SEQ ID NO: 1963), NPKHNAT (SEQ ID NO: 57 of U.S. Pat. No. 9,475,845; herein SEQ ID NO: 1964), PDGMRTT (SEQ ID NO: 58 of U.S. Pat. No. 9,475,845; herein SEQ ID NO: 1965), PNNNKTT (SEQ ID NO: 59 of U.S. Pat. No. 9,475,845; herein SEQ ID NO: 1966), QSTTHDS (SEQ ID NO: 60 of U.S. Pat. No. 9,475,845; herein SEQ ID NO: 1967), TGSKQKQ (SEQ ID NO: 61 of U.S. Pat. No. 9,475,845; herein SEQ ID NO: 1968), SLKHQAL (SEQ ID NO: 62 of U.S. Pat. No. 9,475,845; herein SEQ ID NO: 1969), SPIDGEQ (SEQ ID NO: 63 of U.S. Pat. No. 9,475,845; herein SEQ ID NO: 1970), WIFPWIQL (SEQ ID NO: 64 and 112 of U.S. Pat. No. 9,475,845; herein SEQ ID NO: 1971), CDCRGDCFC (SEQ ID NO: 65 of U.S. Pat. No. 9,475,845; herein SEQ ID NO: 1972), CNGRC (SEQ ID NO: 66 of U.S. Pat. No. 9,475,845; herein SEQ ID NO: 1973), CPRECES (SEQ ID NO: 67 of U.S. Pat. No. 9,475,845; herein SEQ ID NO: 1974), CTIIHWGFTLC (SEQ ID NO: 68 and 123 of U.S. Pat. No. 9,475,845; herein SEQ ID NO: 1975), CGRRAGGSC (SEQ ID NO: 69 of U.S. Pat. No. 9,475,845; herein SEQ ID NO: 1976), CKGGRAKDC (SEQ ID NO: 70 of U.S. Pat. No. 9,475,845; herein SEQ ID NO: 1977), CVPELGHEC (SEQ ID NO: 71 and 115 of U.S. Pat. No. 9,475,845; herein SEQ ID NO: 1978), CRRETAWAK (SEQ ID NO: 72 of U.S. Pat. No. 9,475,845; herein SEQ ID NO: 1979), VSWFSHRYSPFAVS (SEQ ID NO: 73 of U.S. Pat. No. 9,475,845; herein SEQ ID NO: 1980), GYRDGYAGPILYN (SEQ ID NO: 74 of U.S. Pat. No. 9,475,845; herein SEQ ID NO: 1981), XXXYXXX (SEQ ID NO: 75 of U.S. Pat. No. 9,475,845; herein SEQ ID NO: 1982), YXNW (SEQ ID NO: 76 of U.S. Pat. No. 9,475,845; herein SEQ ID NO: 1983), RPLPPLP (SEQ ID NO: 77 of U.S. Pat. No. 9,475,845; herein SEQ ID NO: 1984), APPLPPR (SEQ ID NO: 78 of U.S. Pat. No. 9,475,845; herein SEQ ID NO: 1985), DVFYPYPYASGS (SEQ ID NO: 79 of U.S. Pat. No. 9,475,845; herein SEQ ID NO: 1986), MYWYPY (SEQ ID NO: 80 of U.S. Pat. No. 9,475,845; herein SEQ ID NO: 1987), DITWDQLWDLMK (SEQ ID NO: 81 of U.S. Pat. No. 9,475,845; herein SEQ ID NO: 1988), CWDDXWLC (SEQ ID NO: 82 of U.S. Pat. No. 9,475,845; herein SEQ ID NO: 1989), EWCEYLGGYLRCYA (SEQ ID NO: 83 of U.S. Pat. No. 9,475,845; herein SEQ ID NO: 1990), YXCXXGPXTWXCXP (SEQ ID NO: 84 of U.S. Pat. No. 9,475,845; herein SEQ ID NO: 1991), IEGPTLRQWLAARA (SEQ ID NO: 85 of U.S. Pat. No. 9,475,845; herein SEQ ID NO: 1992), LWXXX (SEQ ID NO: 86 of U.S. Pat. No. 9,475,845; herein SEQ ID NO: 1993), XFXXYLW (SEQ ID NO: 87 of U.S. Pat. No. 9,475,845; herein SEQ ID NO: 1994), SSIISHFRWGLCD (SEQ ID NO: 88 of U.S. Pat. No. 9,475,845; herein SEQ ID NO: 1995), MSRPACPPNDKYE (SEQ ID NO: 89 of U.S. Pat. No. 9,475,845: herein SEQ ID NO: 1996), CLRSGRGC (SEQ ID NO: 90 of U.S. Pat. No. 9,475,845; herein SEQ ID NO: 1997), CHWMFSPWC (SEQ ID NO: 91 of U.S. Pat. No. 9,475,845; herein SEQ ID NO: 1998), WXXF (SEQ ID NO: 92 of U.S. Pat. No. 9,475,845; herein SEQ ID NO: 1999), CSSRLDAC (SEQ ID NO: 93 of U.S. Pat. No. 9,475,845; herein SEQ ID NO: 2000), CLPVASC (SEQ ID NO: 94 of U.S. Pat. No. 9,475,845; herein SEQ ID NO: 2001), CGFECVRQCPERC (SEQ ID NO: 95 of U.S. Pat. No. 9,475,845; herein SEQ ID NO: 2002), CVALCREACGEGC (SEQ ID NO: 96 of U.S. Pat. No. 9,475,845; herein SEQ ID NO: 2003), SWCEPGWCR (SEQ ID NO: 97 of U.S. Pat. No. 9,475,845 herein SEQ ID NO: 2004), YSGKWGW (SEQ ID NO: 98 of U.S. Pat. No. 9,475,845; herein SEQ ID NO: 2005), GLSGGRS (SEQ ID NO: 99 of U.S. Pat. No. 9,475,845; herein SEQ ID NO: 2006), LMLPRAD (SEQ ID NO: 100 of U.S. Pat. No. 9,475,845; herein SEQ ID NO: 2007), CSCFRDVCC (SEQ ID NO: 101 of U.S. Pat. No. 9,475,845; herein SEQ ID NO: 2008), CRDVVSVIC (SEQ ID NO: 102 of U.S. Pat. No. 9,475,845; herein SEQ ID NO: 2009), MARSGL (SEQ ID NO: 103 of U.S. Pat. No. 9,475,845; herein SEQ ID NO: 2010), MARAKE (SEQ ID NO: 104 of U.S. Pat. No. 9,475,845; herein SEQ ID NO: 2011), MSRTMS (SEQ ID NO: 105 of U.S. Pat. No. 9,475,845; herein SEQ ID NO: 2012), KCCYSL (SEQ ID NO: 106 of U.S. Pat. No. 9,475,845; herein SEQ ID NO: 2013), MYWGDSHWLQYWYE (SEQ ID NO: 107 of U.S. Pat. No. 9,475,845; herein SEQ ID NO: 2014), MQLPLAT (SEQ ID NO: 108 of U.S. Pat. No. 9,475,845; herein SEQ ID NO: 2015), EWLS (SEQ ID NO: 109 of U.S. Pat. No. 9,475,845; herein SEQ ID NO: 2016), SNEW (SEQ ID NO: 110 of U.S. Pat. No. 9,475,845; herein SEQ ID NO: 2017), TNYL (SEQ ID NO: 111 of U.S. Pat. No. 9,475,845; herein SEQ ID NO: 2018), WDLAWMFRLPVG (SEQ ID NO: 113 of U.S. Pat. No. 9,475,845; herein SEQ ID NO: 2019), CTVALPGGYVRVC (SEQ ID NO: 114 of U.S. Pat. No. 9,475,845; herein SEQ ID NO: 2020), CVAYCIEHHCWTC (SEQ ID NO: 116 of U.S. Pat. No. 9,475,845; herein SEQ ID NO: 2021), CVFAHNYDYLVC (SEQ ID NO: 117 of U.S. Pat. No. 9,475,845; herein SEQ ID NO: 2022), CVFTSNYAFC (SEQ ID NO: 118 of U.S. Pat. No. 9,475,845; herein SEQ ID NO: 2023), VHSPNKK (SEQ ID NO: 119 of U.S. Pat. No. 9,475,845; herein SEQ ID NO: 2024), CRGDGWC (SEQ ID NO: 120 of U.S. Pat. No. 9,475,845; herein SEQ ID NO: 2025), XRGCDX (SEQ ID NO: 121 of U.S. Pat. No. 9,475,845; herein SEQ ID NO: 2026), PXXX (SEQ ID NO: 122 of U.S. Pat. No. 9,475,845; herein SEQ ID NO: 2027), SGKGPRQITAL (SEQ ID NO: 124 of U.S. Pat. No. 9,475,845; herein SEQ ID NO: 2028), AAAAAAAAAXXXXX (SEQ ID NO: 125 of U.S. Pat. No. 9,475,845; herein SEQ ID NO: 2029), VYMSPF (SEQ ID NO: 126 of U.S. Pat. No. 9,475,845; herein SEQ ID NO: 2030), ATWLPPR (SEQ ID NO: 127 of U.S. Pat. No. 9,475,845; herein SEQ ID NO: 2031), HTMYYHHYQHHL (SEQ ID NO: 128 of U.S. Pat. No. 9,475,845; herein SEQ ID NO: 2032), SEVGCRAGPLQWLCEKYFG (SEQ ID NO: 129 of U.S. Pat. No. 9,475,845; herein SEQ ID NO: 2033), CGLLPVGRPDRNVWRWLC (SEQ ID NO: 130 of U.S. Pat. No. 9,475,845; herein SEQ ID NO: 2034), CKGQCDRFKGLPWEC (SEQ ID NO: 131 of U.S. Pat. No. 9,475,845; herein SEQ ID NO: 2035), SGRSA (SEQ ID NO: 132 of U.S. Pat. No. 9,475,845; herein SEQ ID NO: 2036), WGFP (SEQ ID NO: 133 of U.S. Pat. No. 9,475,845; herein SEQ ID NO: 2037), AEPMPHSLNFSQYLWYT (SEQ ID NO: 134 of U.S. Pat. No. 9,475,845; herein SEQ ID NO: 2038), WAYXSP (SEQ ID NO: 135 of U.S. Pat. No. 9,475,845; herein SEQ ID NO: 2039), IELLQAR (SEQ ID NO: 136 of U.S. Pat. No. 9,475,845; herein SEQ ID NO: 2040), AYTKCSRQWRTCMTTH (SEQ ID NO: 137 of U.S. Pat. No. 9,475,845; herein SEQ ID NO: 2041), PQNSKIPGPTFLDPH (SEQ ID NO: 138 of U.S. Pat. No. 9,475,845; herein SEQ ID NO: 2042), SMEPALPDWWWKMFK (SEQ ID NO: 139 of U.S. Pat. No. 9,475,845; herein SEQ ID NO: 2043), ANTPCGPYTHDCPVKR (SEQ ID NO: 140 of U.S. Pat. No. 9,475,845; herein SEQ ID NO: 2044), TACHQHVRMVRP (SEQ ID NO: 141 of U.S. Pat. No. 9,475,845; herein SEQ ID NO: 2045), VPWMEPAYQRFL (SEQ ID NO: 142 of U.S. Pat. No. 9,475,845; herein SEQ ID NO: 2046), DPRATPGS (SEQ ID NO: 143 of U.S. Pat. No. 9,475,845; herein SEQ ID NO: 2047), FRPNRAQDYNTN (SEQ ID NO: 144 of U.S. Pat. No. 9,475,845; herein SEQ ID NO: 2048), CTKNSYLMC (SEQ ID NO: 145 of U.S. Pat. No. 9,475,845; herein SEQ ID NO: 2049), CXXTXXXGXGC (SEQ ID NO: 146 of U.S. Pat. No. 9,475,845; herein SEQ ID NO: 2050), CPIEDRPMC (SEQ ID NO: 147 of U.S. Pat. No. 9,475,845; herein SEQ ID NO: 2051), HEWSYLAPYPWF (SEQ ID NO: 148 of U.S. Pat. No. 9,475,845; herein SEQ ID NO: 2052), MCPKHPLGC (SEQ ID NO: 149 of U.S. Pat. No. 9,475,845; herein SEQ ID NO: 2053), RMWPSSTVNLSAGRR (SEQ ID NO: 150 of U.S. Pat. No. 9,475,845; herein SEQ ID NO: 2054), SAKTAVSQRVWLPSHRGGEP (SEQ ID NO: 151 of U.S. Pat. No. 9,475,845; herein SEQ ID NO: 2055), KSREHVNNSACPSKRITAAL (SEQ ID NO: 152 of U.S. Pat. No. 9,475,845; herein SEQ ID NO: 2056), EGFR (SEQ ID NO: 153 of U.S. Pat. No. 9,475,845; herein SEQ ID NO: 2057), AGLGVR (SEQ ID NO: 154 of U.S. Pat. No. 9,475,845; herein SEQ ID NO: 2058), GTRQGHTMRLGVSDG (SEQ ID NO: 155 of U.S. Pat. No. 9,475,845; herein SEQ ID NO: 2059), IAGLATPGWSHWLAL (SEQ ID NO: 156 of U.S. Pat. No. 9,475,845; herein SEQ ID NO: 2060), SMSIARL (SEQ ID NO: 157 of U.S. Pat. No. 9,475,845; herein SEQ ID NO: 2061), HTFEPGV (SEQ ID NO: 158 of U.S. Pat. No. 9,475,845; herein SEQ ID NO: 2062), NTSLKRISNKRIRRK (SEQ ID NO: 159 of U.S. Pat. No. 9,475,845; herein SEQ ID NO: 2063), LRIKRKRRKRKKTRK (SEQ ID NO: 160 of U.S. Pat. No. 9,475,845; herein SEQ ID NO: 2064), GGG, GFS, LWS, EGG, LLV, LSP, LBS, AGG, GRR, GGH and GTV.

[0106] In one embodiment, the AAV serotype may be, or may have a sequence as described in United States Publication No. US 20160369298, the contents of which are herein incorporated by reference in their entirety, such as, but not limited to, site-specific mutated capsid protein of AAV2 (SEQ ID NO: 97 of US 20160369298; herein SEQ ID NO: 2065) or variants thereof, wherein the specific site is at least one site selected from sites R447, G453, S578, N587, N587+1, S662 of VP1 or fragment thereof.

[0107] Further, any of the mutated sequences described in US 20160369298, may be or may have, but not limited to, any of the following sequences SDSGASN (SEQ ID NO: 1 and SEQ ID NO: 231 of US20160369298; herein SEQ ID NO: 2066), SPSGASN (SEQ ID NO: 2 of US20160369298; herein SEQ ID NO: 2067), SHSGASN (SEQ ID NO: 3 of US20160369298; herein SEQ ID NO: 2068), SRSGASN (SEQ ID NO: 4 of US20160369298; herein SEQ ID NO: 2069), SKSGASN (SEQ ID NO: 5 of US20160369298; herein SEQ ID NO: 2070), SNSGASN (SEQ ID NO: 6 of US20160369298; herein SEQ ID NO: 2071), SGSGASN (SEQ ID NO: 7 of US20160369298; herein SEQ ID NO: 2072), SASGASN (SEQ ID NO: 8, 175, and 221 of US20160369298; herein SEQ ID NO: 2073), SESGTSN (SEQ ID NO: 9 of US20160369298; herein SEQ ID NO: 2074), STTGGSN (SEQ ID NO: 10 of US20160369298; herein SEQ ID NO: 2075), SSAGSTN (SEQ ID NO: 11 of US20160369298; herein SEQ ID NO: 2076), NNDSQA (SEQ ID NO: 12 of US20160369298; herein SEQ ID NO: 2077), NNRNQA (SEQ ID NO: 13 of US20160369298; herein SEQ ID NO: 2078), NNNKQA (SEQ ID NO: 14 of US20160369298; herein SEQ ID NO: 2079), NAKRQA (SEQ ID NO: 15 of US20160369298; herein SEQ ID NO: 2080), NDEHQA (SEQ ID NO: 16 of US20160369298; herein SEQ ID NO: 2081), NTSQKA (SEQ ID NO: 17 of US20160369298; herein SEQ ID NO: 2082), YYLSRTNTPSGTDTQSRLVFSQAGA (SEQ ID NO: 18 of US20160369298; herein SEQ ID NO: 2083), YYLSRTNTDSGTETQSGLDFSQAGA (SEQ ID NO: 19 of US20160369298; herein SEQ ID NO: 2084), YYLSRTNTESGTPTQSALEFSQAGA (SEQ ID NO: 20 of US20160369298; herein SEQ ID NO: 2085), YYLSRTNTHSGTHTQSPLHFSQAGA (SEQ ID NO: 21 of US20160369298; herein SEQ ID NO: 2086), YYLSRTNTSSGTTTTSHLIFSQAGA (SEQ ID NO: 22 of US20160369298; herein SEQ ID NO: 2087), YYLSRTNTRSGIMTKSSLMFSQAGA (SEQ ID NO: 23 of US20160369298; herein SEQ ID NO: 2088), YYLSRTNTKSGRKTLSNLSFSQAGA (SEQ ID NO: 24 of US20160369298: herein SEQ ID NO: 2089), YYLSRTNDGSGPVTPSKLRFSQRGA (SEQ ID NO: 25 of US20160369298; herein SEQ ID NO: 2090), YYLSRTNAASGHATHSDLKFSQPGA (SEQ ID NO: 26 of US20160369298; herein SEQ ID NO: 2091), YYLSRTNGQAGSLTMSELGFSQVGA (SEQ ID NO: 27 of US20160369298; herein SEQ ID NO: 2092), YYLSRTNSTGGNQTTSQLLFSQLSA (SEQ ID NO: 28 of US20160369298; herein SEQ ID NO: 2093), YFLSRTNNNTGLNTNSTLNFSQGRA (SEQ ID NO: 29 of US20160369298; herein SEQ ID NO: 2094), SKTGADNNNSEYSWTG (SEQ ID NO: 30 of US20160369298; herein SEQ ID NO: 2095), SKTDADNNNSEYSWTG (SEQ ID NO: 31 of US20160369298; herein SEQ ID NO: 2096), SKTEADNNNSEYSWTG (SEQ ID NO: 32 of US20160369298; herein SEQ ID NO: 2097), SKTPADNNNSEYSWTG (SEQ ID NO: 33 of US20160369298; herein SEQ ID NO: 2098), SKTHADNNNSEYSWTG (SEQ ID NO: 34 of US20160369298; herein SEQ ID NO: 2099), SKTQADNNNSEYSWTG (SEQ ID NO: 35 of US20160369298; herein SEQ ID NO: 2100), SKTIADNNNSEYSWTG (SEQ ID NO: 36 of US20160369298; herein SEQ ID NO: 2101), SKTMADNNNSEYSWTG (SEQ ID NO: 37 of US20160369298; herein SEQ ID NO: 2102), SKTRADNNNSEYSWTG (SEQ ID NO: 38 of US20160369298; herein SEQ ID NO: 2103), SKTNADNNNSEYSWTG (SEQ ID NO: 39 of US20160369298; herein SEQ ID NO: 2104), SKTVGRNNNSEYSWTG (SEQ ID NO: 40 of US20160369298; herein SEQ ID NO: 2105), SKTADRNNNSEYSWTG (SEQ ID NO: 41 of US20160369298; herein SEQ ID NO: 2106), SKKLSQNNNSKYSWQG (SEQ ID NO: 42 of US20160369298; herein SEQ ID NO: 2107), SKPTTGNNNSDYSWPG (SEQ ID NO: 43 of US20160369298; herein SEQ ID NO: 2108), STQKNENNNSNYSWPG (SEQ ID NO: 44 of US20160369298; herein SEQ ID NO: 2109), HKDDEGKF (SEQ ID NO: 45 of US20160369298; herein SEQ ID NO: 2110), HKDDNRKF (SEQ ID NO: 46 of US20160369298; herein SEQ ID NO: 2111), HKDDTNKF (SEQ ID NO: 47 of US20160369298; herein SEQ ID NO: 2112), HEDSDKNF (SEQ ID NO: 48 of US20160369298; herein SEQ ID NO: 2113), HRDGADSF (SEQ ID NO: 49 of US20160369298; herein SEQ ID NO: 2114), HGDNKSRF (SEQ ID NO: 50 of US20160369298; herein SEQ ID NO: 2115), KQGSEKTNVDFEEV (SEQ ID NO: 51 of US20160369298; herein SEQ ID NO: 2116), KQGSEKTNVDSEEV (SEQ ID NO: 52 of US20160369298; herein SEQ ID NO: 2117), KQGSEKTNVDVEEV (SEQ ID NO: 53 of US20160369298; herein SEQ ID NO: 2118), KQGSDKTNVDDAGV (SEQ ID NO: 54 of US20160369298; herein SEQ ID NO: 2119), KQGSSKTNVDPREV (SEQ ID NO: 55 of US20160369298; herein SEQ ID NO: 2120), KQGSRKTNVDHKQV (SEQ ID NO: 56 of US20160369298; herein SEQ ID NO: 2121), KQGSKGGNVDTNRV (SEQ ID NO: 57 of US20160369298; herein SEQ ID NO: 2122), KQGSGEANVDNGDV (SEQ ID NO: 58 of US20160369298; herein SEQ ID NO: 2123), KQDAAADNIDYDHV (SEQ ID NO: 59 of US20160369298; herein SEQ ID NO: 2124), KQSGTRSNAAASSV (SEQ ID NO: 60 of US20160369298; herein SEQ ID NO: 2125), KENTNTNDTELTNV (SEQ ID NO: 61 of US20160369298; herein SEQ ID NO: 2126), QRGNNVAATADVNT (SEQ ID NO: 62 of US20160369298; herein SEQ ID NO: 2127), QRGNNEAATADVNT (SEQ ID NO: 63 of US20160369298; herein SEQ ID NO: 2128), QRGNNPAATADVNT (SEQ ID NO: 64 of US20160369298; herein SEQ ID NO: 2129), QRGNNHAATADVNT (SEQ ID NO: 65 of US20160369298; herein SEQ ID NO: 2130), QEENNIAATPGVNT (SEQ ID NO: 66 of US20160369298; herein SEQ ID NO: 2131), QPPNNMAATHEVNT (SEQ ID NO: 67 of US20160369298; herein SEQ ID NO: 2132), QHHNNSAATTIVNT (SEQ ID NO: 68 of US20160369298; herein SEQ ID NO: 2133), QTTNNRAAFNMVET (SEQ ID NO: 69 of US20160369298; herein SEQ ID NO: 2134), QKKNNNAASKKVAT (SEQ ID NO: 70 of US20160369298; herein SEQ ID NO: 2135), QGGNNKAADDAVKT (SEQ ID NO: 71 of US20160369298; herein SEQ ID NO: 2136), QAAKGGAADDAVKT (SEQ ID NO: 72 of US20160369298; herein SEQ ID NO: 2137), QDDRAAAANESVDT (SEQ ID NO: 73 of US20160369298; herein SEQ ID NO: 2138), QQQHDDAAYQRVHT (SEQ ID NO: 74 of US20160369298; herein SEQ ID NO: 2139), QSSSSLAAVSTVQT (SEQ ID NO: 75 of US20160369298; herein SEQ ID NO: 2140), QNNQTTAAIRNVTT (SEQ ID NO: 76 of US20160369298; herein SEQ ID NO: 2141), NYNKKSDNVDFT (SEQ ID NO: 77 of US20160369298; herein SEQ ID NO: 2142), NYNKKSENVDFT (SEQ ID NO: 78 of US20160369298; herein SEQ ID NO: 2143), NYNKKSLNVDFT (SEQ ID NO: 79 of US20160369298; herein SEQ ID NO: 2144), NYNKKSPNVDFT (SEQ ID NO: 80 of US20160369298; herein SEQ ID NO: 2145), NYSKKSHCVDFT (SEQ ID NO: 81 of US20160369298; herein SEQ ID NO: 2146), NYRKTIYVDFT (SEQ ID NO: 82 of US20160369298; herein SEQ ID NO: 2147), NYKEKKDVHFT (SEQ ID NO: 83 of US20160369298; herein SEQ ID NO: 2148), NYGHRAIVQFT (SEQ ID NO: 84 of US20160369298; herein SEQ ID NO: 2149), NYANHQFVVCT (SEQ ID NO: 85 of US20160369298; herein SEQ ID NO: 2150), NYDDDPTGVLLT (SEQ ID NO: 86 of US20160369298; herein SEQ ID NO: 2151), NYDDPTGVLLT (SEQ ID NO: 87 of US20160369298; herein SEQ ID NO: 2152), NFEQQNSVEWT (SEQ ID NO: 88 of US20160369298; herein SEQ ID NO: 2153), SQSGASN (SEQ ID NO: 89 and SEQ ID NO: 241 of US20160369298; herein SEQ ID NO: 2154), NNGSQA (SEQ ID NO: 90 of US20160369298; herein SEQ ID NO: 2155), YYLSRTNTPSGTTTWSRLQFSQAGA (SEQ ID NO: 91 of US20160369298; herein SEQ ID NO: 2156), SKTSADNNNSEYSWTG (SEQ ID NO: 92 of US20160369298; herein SEQ ID NO: 2157), HKDDEEKF (SEQ ID NO: 93, 209, 214, 219, 224, 234, 239, and 244 of US20160369298; herein SEQ ID NO: 2158), KQGSEKTNVDIEEV (SEQ ID NO: 94 of US20160369298; herein SEQ ID NO: 2159), QRGNNQAATADVNT (SEQ ID NO: 95 of US20160369298; herein SEQ ID NO: 2160), NYNKKSVNVDFT (SEQ ID NO: 96 of US20160369298; herein SEQ ID NO: 2161), SQSGASNYNTPSGTTTQSRLQFSTSADNNNSEYSWTGATKYH (SEQ ID NO: 106 of US20160369298; herein SEQ ID NO: 2162), SASGASNFNSEGGSLTQSSLGFSTDGENNNSDFSWTGATKYH (SEQ ID NO: 107 of US20160369298; herein SEQ ID NO: 2163), SQSGASNYNTPSGTTTQSRLQFSTDGENNNSDFSWTGATKYH (SEQ ID NO: 108 of US20160369298; herein SEQ ID NO: 2164), SASGASNYNTPSGTTTQSRLQFSTSADNNNSEFSWPGATTTYH (SEQ ID NO: 109 of US20160369298; herein SEQ ID NO: 2165), SQSGASNFNSEGGSLTQSSLGFSTDGENNNSDFSWTGATKYH (SEQ ID NO: 110 of US20160369298; herein SEQ ID NO: 2166), SASGASNYNTPSGSLTQSSLGFSTDGENNNSDFSWTGATKYH (SEQ ID NO: 111 of US20160369298; herein SEQ ID NO: 2167), SQSGASNYNTPSGTTQSRLQFSTSADNNNSDFSTSADNNNSDFSWTGATKYH (SEQ ID NO: 112 of US20160369298; herein SEQ ID NO: 2168), SGAGASNFNSEGGSLTQSSLGFSTDGENNNSDFSWTGATKYH (SEQ ID NO: 113 of US20160369298; herein SEQ ID NO: 2169), SGAGASN (SEQ ID NO: 176 of US20160369298; herein SEQ ID NO: 2170), NSEGGSLTQSSLGFS (SEQ ID NO: 177, 185, 193 and 202 of US20160369298; herein SEQ ID NO: 2171), TDGENNNSDFS (SEQ ID NO: 178 of US20160369298; herein SEQ ID NO: 2172), SEFSWPGATT (SEQ ID NO: 179 of US20160369298; herein SEQ ID NO: 2173), TSADNNNSDFSWT (SEQ ID NO: 180 of US20160369298; herein SEQ ID NO: 2174), SQSGASNY (SEQ ID NO: 181, 187, and 198 of US20160369298; herein SEQ ID NO: 2175), NTPSGTTTQSRLQFS (SEQ ID NO: 182, 188, 191, and 199 of US20160369298; herein SEQ ID NO: 2176), TSADNNNSEYSWTGATKYH (SEQ ID NO: 183 of US20160369298; herein SEQ ID NO: 2177), SASGASNF (SEQ ID NO: 184 of US20160369298; herein SEQ ID NO: 2178), TDGENNNSDFSWTGATKYH (SEQ ID NO: 186, 189, 194, 197, and 203 of US20160369298; herein SEQ ID NO: 2179), SASGASNY (SEQ ID NO: 190 and SEQ ID NO: 195 of US20160369298; herein SEQ ID NO: 2180), TSADNNNSEFSWPGATIYH (SEQ ID NO: 192 of US20160369298; herein SEQ ID NO: 2181), NTPSGSLTQSSLGFS (SEQ ID NO: 196 of US20160369298; herein SEQ ID NO: 2182), TSADNNNSDFSWTGATKYH (SEQ ID NO: 200 of US20160369298; herein SEQ ID NO: 2183), SGAGASNF (SEQ ID NO: 201 of US20160369298; herein SEQ ID NO: 2184), CTCCAGVVSVVSMRSRVCVNSGCAGCTDHCVVSRNSGTCVMSACACAA (SEQ ID NO: 204 of US20160369298; herein SEQ ID NO: 2185), CTCCAGAGAGGCAACAGACAAGCAGCTACCGCAGATGTCAACACACAA (SEQ ID NO: 205 of US20160369298; herein SEQ ID NO: 2186), SAAGASN (SEQ ID NO: 206 of US20160369298; herein SEQ ID NO: 2187), YFLSRTNTESGSTTQSTLRFSQAG (SEQ ID NO: 207 of US20160369298; herein SEQ ID NO: 2188), SKTSADNNNSDFS (SEQ ID NO: 208, 228, and 253 of US20160369298; herein SEQ ID NO: 2189), KQGSEKTDVDIDKV (SEQ ID NO: 210 of US20160369298; herein SEQ ID NO: 2190), STAGASN (SEQ ID NO: 211 of US20160369298; herein SEQ ID NO: 2191), YFLSRTNTTSGIETQSTLRFSQAG (SEQ ID NO: 212 and SEQ ID NO: 247 of US20160369298; herein SEQ ID NO: 2192), SKTDGENNNSDFS (SEQ ID NO: 213 and SEQ ID NO: 248 of US20160369298; herein SEQ ID NO: 2193), KQGAAADDVEIDGV (SEQ ID NO: 215 and SEQ ID NO: 250 of US20160369298; herein SEQ ID NO: 2194), SEAGASN (SEQ ID NO: 216 of US20160369298; herein SEQ ID NO: 2195), YYLSRTNTPSGTTTQSRLQFSQAG (SEQ ID NO: 217, 232 and 242 of US20160369298; herein SEQ ID NO: 2196), SKTSADNNNSEYS (SEQ ID NO: 218, 233, 238, and 243 of US20160369298; herein SEQ ID NO: 2197), KQGSEKTNVDIEKV (SEQ ID NO: 220, 225 and 245 of US20160369298; herein SEQ ID NO: 2198), YFLSRTNDASGSDTKSTLLFSQAG (SEQ ID NO: 222 of US20160369298; herein SEQ ID NO: 2199), STTPSENNNSEYS (SEQ ID NO: 223 of US20160369298; herein SEQ ID NO: 2200), SAAGATN (SEQ ID NO: 226 and SEQ ID NO: 251 of US20160369298; herein SEQ ID NO: 2201), YFLSRTNGEAGSATLSELRFSQAG (SEQ ID NO: 227 of US20160369298; herein SEQ ID NO: 2202), HGDDADRF (SEQ ID NO: 229 and SEQ ID NO: 254 of US20160369298; herein SEQ ID NO: 2203), KQGAEKSDVEVDRV (SEQ ID NO: 230 and SEQ ID NO: 255 of US20160369298; herein SEQ ID NO: 2204), KQDSGGDNIDIDQV (SEQ ID NO: 235 of US20160369298; herein SEQ ID NO: 2205), SDAGASN (SEQ ID NO: 236 of US20160369298; herein SEQ ID NO: 2206), YFLSRTNTEGGHDTQSTLRFSQAG (SEQ ID NO: 237 of US20160369298; herein SEQ ID NO: 2207), KEDGGGSDVAIDEV (SEQ ID NO: 240 of US20160369298; herein SEQ ID NO: 2208), SNAGASN (SEQ ID NO: 246 of US20160369298; herein SEQ ID NO: 2209), and YFLSRTNGEAGSATLSELRFSQPG (SEQ ID NO: 252 of US20160369298; herein SEQ ID NO: 2210). Non-limiting examples of nucleotide sequences that may encode the amino acid mutated sites include the following, AGCVVMDCAGGARSCASCAAC (SEQ ID NO: 97 of US20160369298; herein SEQ ID NO: 2211), AACRACRRSMRSMAGGCA (SEQ ID NO: 98 of US20160369298; herein SEQ ID NO: 2212), CACRRGGACRRCRMSRRSARSTT (SEQ ID NO: 99 of US20160369298; herein SEQ ID NO: 2213), TATTTCTTGAGCAGAACAAACRVCVVSRSCGGAMNCVHSACGMHSTCAVVSCTTVDS TTTTCTCAGSBCRGSGCG (SEQ ID NO: 100 of US20160369298; herein SEQ ID NO: 2214), TCAAMAMMAVNSRVCSRSAACAACAACAGTRASTTCTCGTGGMMAGGA (SEQ ID NO: 101 of US20160369298; herein SEQ ID NO: 2215), AAGSAARRCRSCRVSRVARVCRATRYCGMSNHCRVMVRSGTC (SEQ ID NO: 102 of US20160369298; herein SEQ ID NO: 2216), CAGVVSVVSMRSRVCVNSGCAGCTDHCVVSRNSGTCVMSACA (SEQ ID NO: 103 of US20160369298; herein SEQ ID NO: 2217), AACTWCRVSVASMVSVHSDDTGTGSWSTKSACT (SEQ ID NO: 104 of US20160369298; herein SEQ ID NO: 2218), TTGTTGAACATCACCACGTGACGCACGTTC (SEQ ID NO: 256 of US20160369298; herein SEQ ID NO: 2219), TCCCCGTGGTTCTACTACATAATGTGGCCG (SEQ ID NO: 257 of US20160369298; herein SEQ ID NO: 2220), TFCCACACTCCGTTTTGGATAATGTTGAAC (SEQ ID NO: 258 of US20160369298; herein SEQ ID NO: 2221), AGGGACATCCCCAGCTCCATGCTGTGGTCG (SEQ ID NO: 259 of US20160369298; herein SEQ ID NO: 2222), AGGGACAACCCCTCCGACTCGCCCTAATCC (SEQ ID NO: 260 of US20160369298; herein SEQ ID NO: 2223), TCCTAGTAGAAGACACCCTCTCACTGCCCG (SEQ ID NO: 261 of US20160369298; herein SEQ ID NO: 2224), AGTACCATGTACACCCACTCTCCCAGTGCC (SEQ ID NO: 262 of US20160369298; herein SEQ ID NO: 2225), ATATGGACGTTCATGCTGATCACCATACCG (SEQ ID NO: 263 of US20160369298; herein SEQ ID NO: 2226), AGCAGGAGCTCCTTGGCCTCAGCGTGCGAG (SEQ ID NO: 264 of US20160369298; herein SEQ ID NO: 2227), ACAAGCAGCTTCACTATGACAACCACTGAC (SEQ ID NO: 265 of US20160369298: herein SEQ ID NO: 2228), CAGCCTAGGAACTGGCTTCCTGGACCCTGTTACCGCCAGCAGAGAGTCTCAAMAMM AVNSRVCSRSAACAACAACAGTRASTTCTCCTGGMMAGGAGCTACCAAGTACCACC TCAATGGCAGAGACTCTCTGGTGAATCCCGGACCAGCTATGGCAAGCCACRRGGAC RRCRMSRRSARSTTTTTTCCTCAGAGCGGGTTCTCATCTTTGGGAAGSAARRCRSCR VSRVARVCRATRYCGMSNHCRVMVRSGTCATGATTACAGACGAAGAGGAGATCTGG AC (SEQ ID NO: 266 of US20160369298; herein SEQ ID NO: 2229), TGGGACAATGGCGGTCGTCTCTCAGAGTTKTKKT (SEQ ID NO: 267 of US20160369298; herein SEQ ID NO: 2230), AGAGGACCKKTCCTCGATGGTTCATGGTGGAGTTIA (SEQ ID NO: 268 of US20160369298; herein SEQ ID NO: 2231), CCACTTAGGGCCTGGTCGATACCGTTCGGTG (SEQ ID NO: 269 of US20160369298: herein SEQ ID NO: 2232), and TCTCGCCCCAAGAGTAGAAACCCCTTCSTTYYG (SEQ ID NO: 270 of US20160369298; herein SEQ ID NO: 2233).

[0108] In some embodiments, the AAV serotype may comprise an ocular cell targeting peptide as described in International Patent Publication WO2016134375, the contents of which are herein incorporated by reference in their entirety, such as, but not limited to SEQ ID NO: 9, and SEQ ID NO:10 of WO02016134375. Further, any of the ocular cell targeting peptides or amino acids described in WO2016134375, may be inserted into any parent AAV serotype, such as, but not limited to, AAV2 (SEQ ID NO:8 of WO2016134375; herein SEQ ID NO: 2234), or AAV9 (SEQ ID NO: 11 of WO2016134375; herein SEQ ID NO: 2235). In some embodiments, modifications, such as insertions are made in AAV2 proteins at P34-A35, T138-A139, A139-P140, G453-T454, N587-R588, and/or R588-Q589. In certain embodiments, insertions are made at D384, G385, 1560, T561, N562. E563. E564. E565, N704, and/or Y705 of AAV9. The ocular cell targeting peptide may be, but is not limited to, any of the following amino acid sequences. GSTPPPM (SEQ ID NO: 1 of WO2016134375; herein SEQ ID NO: 2236), or GETRAPL (SEQ ID NO: 4 of WO2016134375; herein SEQ ID NO: 2237).

[0109] In some embodiments, the AAV serotype may be modified as described in the United States Publication US 20170145405 the contents of which are herein incorporated by reference in their entirety. AAV serotypes may include, modified AAV2 (e.g., modifications at Y444F, Y500F, Y730F and/or S662V), modified AAV3 (e.g., modifications at Y705F, Y731F and/or T492V), and modified AAV6 (e.g., modifications at S663V and/or T492V).

[0110] In some embodiments, the AAV serotype may be modified as described in the International Publication WO2017083722 the contents of which are herein incorporated by reference in their entirety. AAV serotypes may include, AAV1 (Y705+731F+T492V), AAV2 (Y444+500+730F+T491V), AAV3 (Y705+731F), AAV5, AAV5(Y436+693+719F), AAV6 (VP3 variant Y705F/Y731F/T492V), AAV8 (Y733F), AAV9, AAV9 (VP3 variant Y731F), and AAV10 (Y733F).

[0111] In some embodiments, the AAV serotype may comprise, as described in International Patent Publication WO2017015102, the contents of which are herein incorporated by reference in their entirety, an engineered epitope comprising the amino acids SPAKFA (SEQ ID NO: 24 of WO2017015102; herein SEQ ID NO: 2238) or NKDKLN (SEQ ID NO:2 of WO2017015102; herein SEQ ID NO: 2239). The epitope may be inserted in the region of amino acids 665 to 670 based on the numbering of the VP1 capsid of AAV8 (SEQ ID NO:3 of WO2017015102) and/or residues 664 to 668 of AAV3B (SEQ ID NO:3).

[0112] In one embodiment, the AAV serotype may be, or may have a sequence as described in International Patent Publication WO2017058892, the contents of which are herein incorporated by reference in their entirety, such as, but not limited to, AAV variants with capsid proteins that may comprise a substitution at one or more (e.g., 2, 3, 4, 5, 6, or 7) of amino acid residues 262-268, 370-379, 451-459, 472-473, 493-500, 528-534, 547-552, 588-597, 709-710, 716-722 of AAV1, in any combination, or the equivalent amino acid residues in AAV2, AAV3, AAV4, AAV5, AAV6, AAV7, AAV8, AAV9, AAV10, AAV11, AAV12, AAVrh8, AAVrh10 AAVrh32.33, bovine AAV or avian AAV. The amino acid substitution may be, but is not limited to, any of the amino acid sequences described in WO2017058892. In one embodiment, the AAV may comprise an amino acid substitution at residues 256L, 258K, 259Q, 261S, 263A, 264S, 265T, 266G, 272H, 385S, 386Q, S472R, V473D, N500E 547S, 709A, 710N, 716D, 717N, 718N, 720L, A456T, Q457T, N458Q, K459S, T492S, K493A, S586R, S587G, S588N, T589R and/or 722T of AAV1 (SEQ ID NO: 1 of WO2017058892) in any combination, 244N, 246Q, 248R, 249E, 250I, 251K, 252S, 253G, 254S, 255V, 256D, 263Y, 377E, 378N, 453L, 456R, 532Q, 533P, 535N, 536P, 537G, 538T, 539T, 540A, 541T, 542Y, 543L, 546N, 653V, 654P, 656S, 697Q, 698F, 704D, 705S, 706T, 707G, 708E, 709Y and/or 710R of AAV5 (SEQ ID NO:5 of WO2017058892) in any combination, 248R, 316V, 317Q, 318D, 319S, 443N, 530N, 531S, 532Q 533P, 534A, 535N, 540A, 541 T, 542Y, 543L, 545G, 546N, 697Q, 704D, 706T, 708E, 709Y and/or 710R of AAV5 (SEQ ID NO: 5 of WO2017058892) in any combination, 264S, 266G, 269N, 272H, 457Q, 588S and/or 5891 of AAV6 (SEQ ID NO:6 WO2017058892) in any combination, 457T, 459N, 496G, 499N, 500N, 589Q, 590N and/or 592A of AAV8 (SEQ ID NO: 8 WO2017058892) in any combination, 451I, 452N, 453G, 454S, 455G, 456Q, 457N and/or 458Q of AAV9 (SEQ ID NO: 9 WO2017058892) in any combination.

[0113] In some embodiments, the AAV may include a sequence of amino acids at positions 155, 156 and 157 of VP1 or at positions 17, 18, 19 and 20 of VP2, as described in International Publication No. WO 2017066764, the contents of which are herein incorporated by reference in their entirety. The sequences of amino acid may be, but not limited to, N-S-S, S-X-S, S-S-Y, N-X-S, N-S-Y, S-X-Y and N-X-Y, where N, X and Y are, but not limited to, independently non-serine, or non-threonine amino acids, wherein the AAV may be, but not limited to AAV1, AAV2, AAV3, AAV4, AAV5, AAV6, AAV7, AAV8, AAV9, AAV10, AAV11 and AAV12. In some embodiments, the AAV may include a deletion of at least one amino acid at positions 156, 157 or 158 of VP1 or at positions 19, 20 or 21 of VP2, wherein the AAV may be, but not limited to AAV1, AAV2, AAV3, AAV4, AAV5, AAV6, AAV7, AAV8, AAV9, AAV10, AAV11 and AAV12.

[0114] In one embodiment, peptides for inclusion in an AAV serotype may be identified using the methods described by Hui et al. (Molecular Therapy—Methods & Clinical Development (2015) 2, 15029 doi:10.1038/mtm.2015.29; the contents of which are herein incorporated by reference in its entirety). As a non-limiting example, the procedure includes isolating human splenocytes, restimulating the splenocytes in vitro using individual peptides spanning the amino acid sequence of the AAV capsid protein, IFN-gamma ELISpot with the individual peptides used for the in vitro restimulation, bioinformatics analysis to determine the HLA restriction of 15-mers identified by IFN-gamma ELISpot, identification of candidate reactive 9-mer epitopes for a given HLA allele, synthesis candidate 9-mers, second IFN-gamma ELISpot screening of splenocytes from subjects carrying the HLA alleles to which identified AAV epitopes are predicted to bind, determine the AAV capsid-reactive CD8+ T cell epitopes and determine the frequency of subjects reacting to a given AAV epitope.

[0115] In one embodiment, the AAV may be a serotype generated by Cre-recombination-based AAV targeted evolution (CREATE) as described by Deverman et al., (Nature Biotechnology 34(2):204-209 (2016)), the contents of which are herein incorporated by reference in their entirety. In one embodiment, AAV serotypes generated in this manner have improved CNS transduction and/or neuronal and astrocytic tropism, as compared to other AAV serotypes. As non-limiting examples, the AAV serotype may be PHP.B, PHP.B2, PHP.B3, PHP.A, G2A12, G2A15. In one embodiment, these AAV serotypes may be AAV9 (SEQ ID NO: 126 and 127) derivatives with a 7-amino acid insert between amino acids 588-589. Non-limiting examples of these 7-amino acid inserts include TLAVPFK (SEQ ID NO: 873), SVSKPFL (SEQ ID NO: 1249), FTLTTPK (SEQ ID NO: 882), YTLSQGW (SEQ ID NO: 888), QAVRTSL (SEQ ID NO: 914) and/or LAKERLS (SEQ ID NO: 915).

[0116] In one embodiment, the AAV serotype may be as described in Jackson et al (Frontiers in Molecular Neuroscience 9:154 (2016)), the contents of which are herein incorporated by reference in their entirety. In some embodiments, the AAV serotype is PHP.B or AAV9. In some embodiments, the AAV serotype is paired with a synapsin promoter to enhance neuronal transduction, as compared to when more ubiquitous promoters are used (i.e., CBA or CMV).

[0117] In one embodiment, peptides for inclusion in an AAV serotype may be identified by isolating human splenocytes, restimulating the splenocytes in vitro using individual peptides spanning the amino acid sequence of the AAV capsid protein, IFN-gamma ELISpot with the individual peptides used for the in vitro restimulation, bioinformatics analysis to determine the given allele restriction of 15-mers identified by IFN-gamma ELISpot, identification of candidate reactive 9-mer epitopes for a given allele, synthesis candidate 9-mers, second IFN-gamma ELISpot screening of splenocytes from subjects carrying the specific alleles to which identified AAV epitopes are predicted to bind, determine the AAV capsid-reactive CD8+ T cell epitopes and determine the frequency of subjects reacting to a given AAV epitope.

[0118] AAV particles comprising a modulatory polynucleotide encoding the siRNA molecules may be prepared or derived from various serotypes of AAVs, including, but not limited to, AAV1, AAV2, AAV3, AAV4, AAV5, AAV6, AAV7, AAV8, AAV9, AAV9,47, AAV9(hu14), AAV10, AAV11, AAV12, AAVrh8, AAVrh10, AAV-DJ8 and AAV-DJ. In some cases, different serotypes of AAVs may be mixed together or with other types of viruses to produce chimeric AAV particles. As a non-limiting example, the AAV particle is derived from the AAV9 serotype.

### Viral Genome

[0119] In one embodiment, as shown in an AAV particle comprises a viral genome with a payload region.

[0120] In one embodiment, the viral genome may comprise the components as shown in FIG. 1. The payload region 110 is located within the viral genome 100. At the 5′ and/or the 3′ end of the viral genome 100 there may be at least one inverted terminal repeat (ITR) 120. Between the 5′ ITR 120 and the payload region 110, there may be a promoter region 130. In one embodiment, the payload region may comprise at least one modulatory polynucleotide.

[0121] In one embodiment, the viral genome 100 may comprise the components as shown in FIG. 2. The payload region 110 is located within the viral genome 100. At the 5′ and/or the 3′ end of the viral genome 100 there may be at least one inverted terminal repeat (ITR) 120. Between the 5′ ITR 120 and the payload region 110, there may be a promoter region 130. Between the promoter region 130 and the payload region 110, there may be an intron region 140. In one embodiment, the payload region may comprise at least one modulatory polynucleotide.

[0122] In one embodiment, the viral genome 100 may comprise the components as shown in FIG. 3. At the 5′ and/or the 3′ end of the viral genome 100 there may be at least one inverted terminal repeat (ITR) 120. Within the viral genome 100, there may be an enhancer region 150, a promoter region 130, an intron region 140, and a payload region 110. In one embodiment, the payload region may comprise at least one modulatory polynucleotide.

[0123] In one embodiment, the viral genome 100 may comprise the components as shown in FIG. 4. At the 5′ and/or the 3′ end of the viral genome 100 there may be at least one inverted terminal repeat (ITR) 120. Within the viral genome 100, there may be an enhancer region 150, a promoter region 130, an intron region 140, a payload region 110, and a polyadenylation signal sequence region 160. In one embodiment, the payload region may comprise at least one modulatory polynucleotide.

[0124] In one embodiment, the viral genome 100 may comprise the components as shown in FIG. 5. At the 5′ and/or the 3′ end of the viral genome 100 there may be at least one inverted terminal repeat (ITR) 120. Within the viral genome 100, there may be at least one MCS region 170, an enhancer region 150, a promoter region 130, an intron region 140, a payload region 110, and a polyadenylation signal sequence region 160. In one embodiment, the payload region may comprise at least one modulatory polynucleotide.

[0125] In one embodiment, the viral genome 100 may comprise the components as shown in FIG. 6. At the 5′ and/or the 3′ end of the viral genome 100 there may be at least one inverted terminal repeat (ITR) 120. Within the viral genome 100, there may be at least one MCS region 170, an enhancer region 150, a promoter region 130, at least one exon region 180, at least one intron region 140, a payload region 110, and a polyadenylation signal sequence region 160. In one embodiment, the payload region may comprise at least one modulatory polynucleotide.

[0126] In one embodiment, the viral genome 100 may comprise the components as shown in FIGS. 7 and 8. Within the viral genome 100, there may be at least one promoter region 130, and a payload region 110. In one embodiment, the payload region may comprise at least one modulatory polynucleotide.

[0127] In one embodiment, the viral genome 100 may comprise the components as shown in FIG. 9. Within the viral genome 100, there may be at least one promoter region 130, a payload region 110, and a polyadenylation signal sequence region 160. In one embodiment, the payload region may comprise at least one modulatory polynucleotide.

### Viral Genome Size

[0128] In one embodiment, the viral genome which comprises a payload described herein, may be single stranded or double stranded viral genome. The size of the viral genome may be small, medium, large or the maximum size. Additionally, the viral genome may comprise a promoter and a polyA tail.

[0129] In one embodiment, the viral genome which comprises a payload described herein, may be a small single stranded viral genome. A small single stranded viral genome may be 2.7 to 3.5 kb in size such as about 2.7, 2.8, 2.9, 3.0, 3.1, 3.2, 3.3, 3.4, and 3.5 kb in size. As a non-limiting example, the small single stranded viral genome may be 3.2 kb in size. Additionally, the viral genome may comprise a promoter and a polyA tail.

[0130] In one embodiment, the viral genome which comprises a payload described herein, may be a small double stranded viral genome. A small double stranded viral genome may be 1.3 to 1.7 kb in size such as about 1.3, 1.4, 1.5, 1.6, and 1.7 kb in size. As a non-limiting example, the small double stranded viral genome may be 1.6 kb in size. Additionally, the viral genome may comprise a promoter and a polyA tail.

[0131] In one embodiment, the viral genome which comprises a payload described herein, may a medium single stranded viral genome. A medium single stranded viral genome may be 3.6 to 4.3 kb in size such as about 3.6, 3.7, 3.8, 3.9, 4.0, 4.1, 4.2 and 4.3 kb in size. As a non-limiting example, the medium single stranded viral genome may be 4.0 kb in size. Additionally, the viral genome may comprise a promoter and a polyA tail.

[0132] In one embodiment, the viral genome which comprises a payload described herein, may be a medium double stranded viral genome. A medium double stranded viral genome may be 1.8 to 2.1 kb in size such as about 1.8, 1.9, 2.0, and 2.1 kb in size. As a non-limiting example, the medium double stranded viral genome may be 2.0 kb in size. Additionally, the viral genome may comprise a promoter and a polyA tail.

[0133] In one embodiment, the viral genome which comprises a payload described herein, may be a large single stranded viral genome. A large single stranded viral genome may be 4.4 to 6.0 kb in size such as about 4.4, 4.5, 4.6, 4.7, 4.8, 4.9, 5.0, 5.1, 5.2, 5.3, 5.4, 5.5, 5.6, 5.7, 5.8, 5.9 and 6.0 kb in size. As a non-limiting example, the large single stranded viral genome may be 4.7 kb in size. As another non-limiting example, the large single stranded viral genome may be 4.8 kb in size. As yet another non-limiting example, the large single stranded viral genome may be 6.0 kb in size. Additionally, the viral genome may comprise a promoter and a polyA tail.

[0134] In one embodiment, the viral genome which comprises a payload described herein, may be a large double stranded viral genome. A large double stranded viral genome may be 2.2 to 3.0 kb in size such as about 2.2, 2.3, 2.4, 2.5, 2.6, 2.7, 2.8, 2.9 and 3.0 kb in size. As a non-limiting example, the large double stranded viral genome may be 2.4 kb in size. Additionally, the viral genome may comprise a promoter and a polyA tail.

### Viral Genome Component: Inverted Terminal Repeats (ITRs)

[0135] The AAV particles of the present invention comprise a viral genome with at least one ITR region and a payload region. In one embodiment the viral genome has two ITRs. These two ITRs flank the payload region at the 5′ and 3′ ends. The ITRs function as origins of replication comprising recognition sites for replication. ITRs comprise sequence regions which can be complementary and symmetrically arranged. ITRs incorporated into viral genomes of the invention may be comprised of naturally occurring polynucleotide sequences or recombinantly derived polynucleotide sequences.

[0136] The ITRs may be derived from the same serotype as the capsid, selected from any of the serotypes listed in Table 1, or a derivative thereof. The ITR may be of a different serotype from the capsid. In one embodiment the AAV particle has more than one ITR. In a non-limiting example, the AAV particle has a viral genome comprising two ITRs. In one embodiment the ITRs are of the same serotype as one another. In another embodiment the ITRs are of different serotypes. Non-limiting examples include zero, one or both of the ITRs having the same serotype as the capsid. In one embodiment both ITRs of the viral genome of the AAV particle are AAV2 ITRs.

[0137] Independently, each ITR may be about 100 to about 150 nucleotides in length. An ITR may be about 100-105 nucleotides in length, 106-110 nucleotides in length, 111-115 nucleotides in length, 116-120 nucleotides in length, 121-125 nucleotides in length, 126-130 nucleotides in length, 131-135 nucleotides in length, 136-140 nucleotides in length, 141-145 nucleotides in length or 146-150 nucleotides in length. In one embodiment the ITRs are 140-142 nucleotides in length. Non limiting examples of ITR length are 102, 140, 141, 142, 145 nucleotides in length, and those having at least 95% identity thereto.

[0138] In one embodiment, the AAV particle comprises a nucleic acid sequence encoding an siRNA molecule which may be located near the 5′ end of the flip ITR in an expression vector. In another embodiment, the AAV particle comprises a nucleic acid sequence encoding an siRNA molecule may be located near the 3′ end of the flip ITR in an expression vector. In yet another embodiment, the AAV particle comprises a nucleic acid sequence encoding an siRNA molecule may be located near the 5′ end of the flop ITR in an expression vector. In yet another embodiment, the AAV particle comprises a nucleic acid sequence encoding an siRNA molecule may be located near the 3′ end of the flop ITR in an expression vector. In one embodiment, the AAV particle comprises a nucleic acid sequence encoding an siRNA molecule may be located between the 5′ end of the flip ITR and the 3′ end of the flop ITR in an expression vector. In one embodiment, the AAV particle comprises a nucleic acid sequence encoding an siRNA molecule may be located between (e.g., half-way between the 5′ end of the flip ITR and 3′ end of the flop ITR or the 3′ end of the flop ITR and the 5′ end of the flip ITR), the 3′ end of the flip ITR and the 5′ end of the flip ITR in an expression vector. As a non-limiting example, the AAV particle comprises a nucleic acid sequence encoding an siRNA molecule may be located within 1, 2, 3, 4, 5, 6, 7, 8, 9, 10, 11, 12, 13, 14, 15, 16, 17, 18, 19, 20, 21, 22, 23, 24, 25, 26, 27, 28, 29, 30 or more than 30 nucleotides downstream from the 5′ or 3′ end of an ITR (e.g., Flip or Flop ITR) in an expression vector. As a non-limiting example, the AAV particle comprises a nucleic acid sequence encoding an siRNA molecule may be located within 1, 2, 3, 4, 5, 6, 7, 8, 9, 10, 11, 12, 13, 14, 15, 16, 17, 18, 19, 20, 21, 22, 23, 24, 25, 26, 27, 28, 29, 30 or more than 30 nucleotides upstream from the 5′ or 3′ end of an ITR (e.g., Flip or Flop ITR) in an expression vector. As another non-limiting example, the AAV particle comprises a nucleic acid sequence encoding an siRNA molecule may be located within 1-5, 1-10, 1-15, 1-20, 1-25, 1-30, 5-10, 5-15, 5-20, 5-25, 5-30, 10-15, 10-20, 10-25, 10-30, 15-20, 15-25, 15-30, 20-25, 20-30 or 25-30 nucleotides downstream from the 5′ or 3′ end of an ITR (e.g., Flip or Flop ITR) in an expression vector. As another non-limiting example, the AAV particle comprises a nucleic acid sequence encoding an siRNA molecule may be located within 1-5, 1-10, 1-15, 1-20, 1-25, 1-30, 5-10, 5-15, 5-20, 5-25, 5-30, 10-15, 10-20, 10-25, 10-30, 15-20, 15-25, 15-30, 20-25, 20-30 or 25-30 upstream from the 5′ or 3′ end of an ITR (e.g., Flip or Flop ITR) in an expression vector. As a non-limiting example, the AAV particle comprises a nucleic acid sequence encoding an siRNA molecule may be located within the first 1%, 2%, 3%, 4%, 5%, 6%, 7%, 8%, 9%, 10%, 15%, 20%, 25% or more than 25% of the nucleotides upstream from the 5′ or 3′ end of an ITR (e.g., Flip or Flop ITR) in an expression vector. As another non-limiting example, the AAV particle comprises a nucleic acid sequence encoding an siRNA molecule may be located with the first 1-5%, 1-10%, 1-15%, 1-20%, 1-25%, 5-10%, 5-15%, 5-20%, 5-25%, 10-15%, 10-20%, 10-25%, 15-20%, 15-25%, or 20-25% downstream from the 5′ or 3′ end of an ITR (e.g., Flip or Flop ITR) in an expression vector.

### Viral Genome Component: Promoters

[0139] In one embodiment, the payload region of the viral genome comprises at least one element to enhance the transgene target specificity and expression (See e.g., Powell et al. Viral Expression Cassette Elements to Enhance Transgene Target Specificity and Expression in Gene Therapy, 2015; the contents of which are herein incorporated by reference in its entirety). Non-limiting examples of elements to enhance the transgene target specificity and expression include promoters, endogenous miRNAs, post-transcriptional regulatory elements (PREs), polyadenylation (PolyA) signal sequences and upstream enhancers (USEs), CMV enhancers and introns.

[0140] A person skilled in the art may recognize that expression of the polypeptides of the invention in a target cell may require a specific promoter, including but not limited to, a promoter that is species specific, inducible, tissue-specific, or cell cycle-specific (Parr et al., Nat. Med. 3:1145-9 (1997); the contents of which are herein incorporated by reference in their entirety).

[0141] In one embodiment, the promoter is deemed to be efficient when it drives expression of the polypeptide(s) encoded in the payload region of the viral genome of the AAV particle.

[0142] In one embodiment, the promoter is a promoter deemed to be efficient to drive the expression of the modulatory polynucleotide.

[0143] In one embodiment, the promoter is a promoter deemed to be efficient when it drives expression in the cell being targeted.

[0144] In one embodiment, the promoter drives expression of the payload for a period of time in targeted tissues. Expression driven by a promoter may be for a period of 1 hour, 2, hours, 3 hours, 4 hours, 5 hours, 6 hours, 7 hours, 8 hours, 9 hours, 10 hours, 11 hours, 12 hours, 13 hours, 14 hours, 15 hours, 16 hours, 17 hours, 18 hours, 19 hours, 20 hours, 21 hours, 22 hours, 23 hours, 1 day, 2 days, 3 days, 4 days, 5 days, 6 days, 1 week, 8 days, 9 days, 10 days, 11 days, 12 days, 13 days, 2 weeks, 15 days, 16 days, 17 days, 18 days, 19 days, 20 days, 3 weeks, 22 days, 23 days, 24 days, 25 days, 26 days, 27 days, 28 days, 29 days, 30 days, 31 days, 1 month, 2 months, 3 months, 4 months, 5 months, 6 months, 7 months, 8 months, 9 months, 10 months, 11 months, 1 year, 13 months, 14 months, 15 months, 16 months, 17 months, 18 months, 19 months, 20 months, 21 months, 22 months, 23 months, 2 years, 3 years, 4 years, 5 years, 6 years, 7 years, 8 years, 9 years, 10 years or more than 10 years. Expression may be for 1-5 hours, 1-12 hours, 1-2 days, 1-5 days, 1-2 weeks, 1-3 weeks, 1-4 weeks, 1-2 months, 1-4 months, 1-6 months, 2-6 months, 3-6 months, 3-9 months, 4-8 months, 6-12 months, 1-2 years, 1-5 years, 2-5 years, 3-6 years, 3-8 years, 4-8 years or 5-10 years.

[0145] In one embodiment, the promoter drives expression of the payload for at least 1 month, 2 months, 3 months, 4 months, 5 months, 6 months, 7 months, 8 months, 9 months, 10 months, 11 months, 1 year, 2 years, 3 years 4 years, 5 years, 6 years, 7 years, 8 years, 9 years, 10 years, 11 years, 12 years, 13 years, 14 years, 15 years, 16 years, 17 years, 18 years, 19 years, 20 years, 21 years, 22 years, 23 years, 24 years, 25 years, 26 years, 27 years, 28 years, 29 years, 30 years, 31 years, 32 years, 33 years, 34 years, 35 years, 36 years, 37 years, 38 years, 39 years, 40 years, 41 years, 42 years, 43 years, 44 years, 45 years, 46 years, 47 years, 48 years, 49 years, 50 years, 55 years, 60 years, 65 years, or more than 65 years.

[0146] Promoters may be naturally occurring or non-naturally occurring. Non-limiting examples of promoters include viral promoters, plant promoters and mammalian promoters. In some embodiments, the promoters may be human promoters. In some embodiments, the promoter may be truncated.

[0147] Promoters which drive or promote expression in most tissues include, but are not limited to, human elongation factor 1α-subunit (EF1α), cytomegalovirus (CMV) immediate-early enhancer and/or promoter, chicken β-actin (CBA) and its derivative CAG, β glucuronidase (GUSB), or ubiquitin C (UBC). Tissue-specific expression elements can be used to restrict expression to certain cell types such as, but not limited to, muscle specific promoters, B cell promoters, monocyte promoters, leukocyte promoters, macrophage promoters, pancreatic acinar cell promoters, endothelial cell promoters, lung tissue promoters, astrocyte promoters, or nervous system promoters which can be used to restrict expression to neurons, astrocytes, or oligodendrocytes.

[0148] Non-limiting examples of muscle-specific promoters include mammalian muscle creatine kinase (MCK) promoter, mammalian desmin (DES) promoter, mammalian troponin I (TNNI2) promoter, and mammalian skeletal alpha-actin (ASKA) promoter (see, e.g. U.S. Patent Publication US 20110212529, the contents of which are herein incorporated by reference in their entirety)

[0149] Non-limiting examples of tissue-specific expression elements for neurons include neuron-specific enolase (NSE), platelet-derived growth factor (PDGF), platelet-derived growth factor B-chain (PDGF-β), synapsin (Syn), methyl-CpG binding protein 2 (MeCP2), Ca²⁺/calmodulin-dependent protein kinase II (CaMKII), metabotropic glutamate receptor 2 (mGluR2), neurofilament light (NFL) or heavy (NFH), β-globin minigene nβ2, preproenkephalin (PPE), enkephalin (Enk) and excitatory amino acid transporter 2 (EAAT2) promoters. Non-limiting examples of tissue-specific expression elements for astrocytes include glial fibrillary acidic protein (GFAP) and EAAT2 promoters. A non-limiting example of a tissue-specific expression element for oligodendrocytes includes the myelin basic protein (MBP) promoter.

[0150] In one embodiment, the promoter may be less than 1 kb. The promoter may have a length of 200, 210, 220, 230, 240, 250, 260, 270, 280, 290, 300, 310, 320, 330, 340, 350, 360, 370, 380, 390, 400, 410, 420, 430, 440, 450, 460, 470, 480, 490, 500, 510, 520, 530, 540, 550, 560, 570, 580, 590, 600, 610, 620, 630, 640, 650, 660, 670, 680, 690, 700, 710, 720, 730, 740, 750, 760, 770, 780, 790, 800 or more than 800 nucleotides. The promoter may have a length between 200-300, 200-400, 200-500, 200-600, 200-700, 200-800, 300-400, 300-500, 300-600, 300-700, 300-800, 400-500, 400-600, 400-700, 400-800, 500-600, 500-700, 500-800, 600-700, 600-800 or 700-800.

[0151] In one embodiment, the promoter may be a combination of two or more components of the same or different starting or parental promoters such as, but not limited to, CMV and CBA. Each component may have a length of 200, 210, 220, 230, 240, 250, 260, 270, 280, 290, 300, 310, 320, 330, 340, 350, 360, 370, 380, 381, 382, 383, 384, 385, 386, 387, 388, 389, 390, 400, 410, 420, 430, 440, 450, 460, 470, 480, 490, 500, 510, 520, 530, 540, 550, 560, 570, 580, 590, 600, 610, 620, 630, 640, 650, 660, 670, 680, 690, 700, 710, 720, 730, 740, 750, 760, 770, 780, 790, 800 or more than 800. Each component may have a length between 200-300, 200-400, 200-500, 200-600, 200-700, 200-800, 300-400, 300-500, 300-600, 300-700, 300-800, 400-500, 400-600, 400-700, 400-800, 500-600, 500-700, 500-800, 600-700, 600-800 or 700-800. In one embodiment, the promoter is a combination of a 382 nucleotide CMV-enhancer sequence and a 260 nucleotide CBA-promoter sequence.

[0152] In one embodiment, the viral genome comprises a ubiquitous promoter. Non-limiting examples of ubiquitous promoters include CMV, CBA (including derivatives CAG, CBh, etc.), EF-1α, PGK, UBC, GUSB (hGBp), and UCOE (promoter of HNRPA2B1-CBX3).

[0153] Yu et al. (Molecular Pain 2011, 7:63; the contents of which are herein incorporated by reference in their entirety) evaluated the expression of eGFP under the CAG, EF1α, PGK and UBC promoters in rat DRG cells and primary DRG cells using lentiviral vectors and found that UBC showed weaker expression than the other 3 promoters and only 10-12% glial expression was seen for all promoters. Soderblom et al. (E. Neuro 2015; the contents of which are herein incorporated by reference in its entirety) evaluated the expression of eGFP in AAV8 with CMV and UBC promoters and AAV2 with the CMV promoter after injection in the motor cortex. Intranasal administration of a plasmid containing a UBC or EF1α promoter showed a sustained airway expression greater than the expression with the CMV promoter (See e.g., Gill et al., Gene Therapy 2001, Vol. 8, 1539-1546; the contents of which are herein incorporated by reference in their entirety). Husain et al. (Gene Therapy 2009; the contents of which are herein incorporated by reference in its entirety) evaluated an HβH construct with a hGUSB promoter, a HSV-1LAT promoter and an NSE promoter and found that the HβH construct showed weaker expression than NSE in mouse brain. Passini and Wolfe (J. Virol. 2001, 12382-12392, the contents of which are herein incorporated by reference in its entirety) evaluated the long term effects of the HβH vector following an intraventricular injection in neonatal mice and found that there was sustained expression for at least 1 year. Low expression in all brain regions was found by Xu et al. (Gene Therapy 2001, 8, 1323-1332; the contents of which are herein incorporated by reference in their entirety) when NFL and NFH promoters were used as compared to the CMV-lacZ, CMV-luc, EF, GFAP, hENK, nAChR, PPE, PPE+wpre, NSE (0.3 kb), NSE (1.8 kb) and NSE (1.8 kb+wpre). Xu et al. found that the promoter activity in descending order was NSE (1.8 kb), EF, NSE (0.3 kb), GFAP, CMV, hENK, PPE, NFL and NFH. NFL is a 650 nucleotide promoter and NFH is a 920 nucleotide promoter which are both absent in the liver but NFH is abundant in the sensory proprioceptive neurons, brain and spinal cord and NFH is present in the heart. Scn8a is a 470 nucleotide promoter which expresses throughout the DRG, spinal cord and brain with particularly high expression seen in the hippocampal neurons and cerebellar Purkinje cells, cortex, thalamus and hypothalamus (See e.g., Drews et al. Identification of evolutionary conserved, functional noncoding elements in the promoter region of the sodium channel gene SCN8A. Mamm Genome (2007) 18:723-731, and Raymond et al. Expression of-Alternatively Spliced Sodium Channel α-subunit genes, Journal of Biological Chemistry (2004) 279(44) 46234-46241; the contents of each of which are herein incorporated by reference in their entireties).

[0154] Any of promoters taught by the aforementioned Yu, Soderblom, Gill. Husain. Passini, Xu, Drews or Raymond may be used in the present inventions.

[0155] In one embodiment, the promoter is not cell specific.

[0156] In one embodiment, the promoter is an ubiquitin c (UBC) promoter. The UBC promoter may have a size of 300-350 nucleotides. As a non-limiting example, the UBC promoter is 332 nucleotides.

[0157] In one embodiment, the promoter is a β-glucuronidase (GUSB) promoter. The GUSB promoter may have a size of 350-400 nucleotides. As a non-limiting example, the GUSB promoter is 378 nucleotides.

[0158] In one embodiment, the promoter is a neurofilament light (NFL) promoter. The NFL promoter may have a size of 600-700 nucleotides. As a non-limiting example, the NFL promoter is 650 nucleotides. As a non-limiting example, the construct may be AAV-promoter-CMV/globin intron-modulatory polynucleotide-RBG, where the AAV may be self-complementary and the AAV may be the DJ serotype.

[0159] In one embodiment, the promoter is a neurofilament heavy (NFH) promoter. The NFH promoter may have a size of 900-950 nucleotides. As a non-limiting example, the NFH promoter is 920 nucleotides. As a non-limiting example, the construct may be AAV-promoter-CMV/globin intron-modulatory polynucleotide-RBG, where the AAV may be self-complementary and the AAV may be the DJ serotype.

[0160] In one embodiment, the promoter is a scn8a promoter. The scn8a promoter may have a size of 450-500 nucleotides. As a non-limiting example, the scn8a promoter is 470 nucleotides. As a non-limiting example, the construct may be AAV-promoter-CMV/globin intron-modulatory polynucleotide-RBG, where the AAV may be self-complementary and the AAV may be the DJ serotype

[0161] In one embodiment, the viral genome comprises a Pol III promoter.

[0162] In one embodiment, the viral genome comprises a P1 promoter.

[0163] In one embodiment, the viral genome comprises a FXN promoter.

[0164] In one embodiment, the promoter is a phosphoglycerate kinase 1 (PGK) promoter.

[0165] In one embodiment, the promoter is a chicken β-actin (CBA) promoter.

[0166] In one embodiment, the promoter is a CAG promoter which is a construct comprising the cytomegalovirus (CMV) enhancer fused to the chicken beta-actin (CBA) promoter.

[0167] In one embodiment, the promoter is a cytomegalovirus (CMV) promoter.

[0168] In one embodiment, the viral genome comprises a H1 promoter.

[0169] In one embodiment, the viral genome comprises a U6 promoter.

[0170] In one embodiment, the promoter is a liver or a skeletal muscle promoter. Non-limiting examples of liver promoters include human α-1-antitrypsin (hAAT) and thyroxine binding globulin (TBG). Non-limiting examples of skeletal muscle promoters include Desmin, MCK or synthetic C5-12.

[0171] In one embodiment, the promoter is a RNA pol III promoter. As a non-limiting example, the RNA pol III promoter is U6. As a non-limiting example, the RNA pol III promoter is H1.

[0172] In one embodiment, the viral genome comprises two promoters. As a non-limiting example, the promoters are an EF1α promoter and a CMV promoter.

[0173] In one embodiment, the viral genome comprises an enhancer element, a promoter and/or a 5′UTR intron. The enhancer element, also referred to herein as an “enhancer,” may be, but is not limited to, a CMV enhancer, the promoter may be, but is not limited to, a CMV, CBA, UBC, GUSB, NSE, Synapsin, MeCP2, and GFAP promoter and the 5′UTR/intron may be, but is not limited to, SV40, and CBA-MVM. As a non-limiting example, the enhancer, promoter and/or intron used in combination may be: (1) CMV enhancer, CMV promoter, SV40 5′UTR intron; (2) CMV enhancer, CBA promoter, SV 40 5′UTR intron; (3) CMV enhancer, CBA promoter, CBA-MVM 5′UTR intron; (4) UBC promoter; (5) GUSB promoter; (6) NSE promoter; (7) Synapsin promoter; (8) MeCP2 promoter, (9) GFAP promoter, (10) H1 promoter; and (11) U6 promoter.

[0174] In one embodiment, the viral genome comprises an engineered promoter.

[0175] In another embodiment the viral genome comprises a promoter from a naturally expressed protein.

### Viral Genome Component: Untranslated Regions (UTRs)

[0176] By definition, wild type untranslated regions (UTRs) of a gene are transcribed but not translated. Generally, the 5′ UTR starts at the transcription start site and ends at the start codon and the 3′ UTR starts immediately following the stop codon and continues until the termination signal for transcription.

[0177] Features typically found in abundantly expressed genes of specific target organs may be engineered into UTRs to enhance the stability and protein production. As a non-limiting example, a 5′ UTR from mRNA normally expressed in the liver (e.g., albumin, serum amyloid A, Apolipoprotein A/B/E, transferrin, alpha fetoprotein, erythropoietin, or Factor VIII) may be used in the viral genomes of the AAV particles of the invention to enhance expression in hepatic cell lines or liver.

[0178] While not wishing to be bound by theory, wild-type 5′ untranslated regions (UTRs) include features which play roles in translation initiation. Kozak sequences, which are commonly known to be involved in the process by which the ribosome initiates translation of many genes, are usually included in 5′ UTRs. Kozak sequences have the consensus CCR(A/G)CCAUGG, where R is a purine (adenine or guanine) three bases upstream of the start codon (ATG), which is followed by another ‘G’.

[0179] In one embodiment, the 5′UTR in the viral genome includes a Kozak sequence.

[0180] In one embodiment, the 5′UTR in the viral genome does not include a Kozak sequence.

[0181] While not wishing to be bound by theory, wild-type 3′ UTRs are known to have stretches of Adenosines and Uridines embedded therein. These AU rich signatures are particularly prevalent in genes with high rates of turnover. Based on their sequence features and functional properties, the AU rich elements (AREs) can be separated into three classes (Chen et al. 1995, the contents of which are herein incorporated by reference in its entirety): Class 1 AREs, such as, but not limited to, c-Myc and MyoD, contain several dispersed copies of an AUUUA motif within U-rich regions. Class II AREs, such as, but not limited to, GM-CSF and TNF-a, possess two or more overlapping UUAUUUA(U/A)(U/A) nonamers. Class III ARES, such as, but not limited to, c-Jun and Myogenin, are less well defined. These U rich regions do not contain an AUUUA motif. Most proteins binding to the AREs are known to destabilize the messenger, whereas members of the ELAV family, most notably HuR, have been documented to increase the stability of mRNA. HuR binds to AREs of all the three classes. Engineering the HuR specific binding sites into the 3′ UTR of nucleic acid molecules will lead to HuR binding and thus, stabilization of the message in vivo.

[0182] Introduction, removal or modification of 3′ UTR AU rich elements (AREs) can be used to modulate the stability of polynucleotides. When engineering specific polynucleotides, e.g., payload regions of viral genomes, one or more copies of an ARE can be introduced to make polynucleotides less stable and thereby curtail translation and decrease production of the resultant protein. Likewise. AREs can be identified and removed or mutated to increase the intracellular stability and thus increase translation and production of the resultant protein.

[0183] In one embodiment, the 3′ UTR of the viral genome may include an oligo(dT) sequence for templated addition of a poly-A tail.

[0184] In one embodiment, the viral genome may include at least one miRNA seed, binding site or full sequence, microRNAs (or miRNA or miR) are 19-25 nucleotide noncoding RNAs that bind to the sites of nucleic acid targets and down-regulate gene expression either by reducing nucleic acid molecule stability or by inhibiting translation. A microRNA sequence comprises a “seed” region, i.e., a sequence in the region of positions 2-8 of the mature microRNA, which sequence has perfect Watson-Crick complementarity to the miRNA target sequence of the nucleic acid.

[0185] In one embodiment, the viral genome may be engineered to include, alter or remove at least one miRNA binding site, sequence or seed region.

[0186] Any UTR from any gene known in the art may be incorporated into the viral genome of the AAV particle. These UTRs, or portions thereof, may be placed in the same orientation as in the gene from which they were selected or they may be altered in orientation or location. In one embodiment, the UTR used in the viral genome of the AAV particle may be inverted, shortened, lengthened, made with one or more other 5′ UTRs or 3′ UTRs known in the art. As used herein, the term “altered” as it relates to a UTR, means that the UTR has been changed in some way in relation to a reference sequence. For example, a 3′ or 5′ UTR may be altered relative to a wild type or native UTR by the change in orientation or location as taught above or may be altered by the inclusion of additional nucleotides, deletion of nucleotides, swapping or transposition of nucleotides.

[0187] In one embodiment, the viral genome of the AAV particle comprises at least one artificial UTRs which is not a variant of a wild type UTR.

[0188] In one embodiment, the viral genome of the AAV particle comprises UTRs which have been selected from a family of transcripts whose proteins share a common function, structure, feature or property.

### Viral Genome Component: Polyadenylation Sequence

[0189] In one embodiment, the viral genome of the AAV particles of the present invention comprise at least one polyadenylation sequence. The viral genome of the AAV particle may comprise a polyadenylation sequence between the 3′ end of the payload coding sequence and the 5′ end of the 3′ITR.

[0190] In one embodiment, the polyadenylation sequence or “polyA sequence” may range from absent to about 500 nucleotides in length. The polyadenylation sequence may be, but is not limited to, 1, 2, 3, 4, 5, 6, 7, 8, 9, 10, 11, 12, 13, 14, 15, 16, 17, 18, 19, 20, 21, 22, 23, 24, 25, 26, 27, 28, 29, 30, 31, 32, 33, 34, 35, 36, 37, 38, 39, 40, 41, 42, 43, 44, 45, 46, 47, 48, 49, 50, 51, 52, 53, 54, 55, 56, 57, 58, 59, 60, 61, 62, 63, 64, 65, 66, 67, 68, 69, 70, 71, 72, 73, 74, 75, 76, 77, 78, 79, 80, 81, 82, 83, 84, 85, 86, 87, 88, 89, 90, 91, 92, 93, 94, 95, 96, 97, 98, 99, 100, 101, 102, 103, 104, 105, 106, 107, 108, 109, 110, 111, 112, 113, 114, 115, 116, 117, 118, 119, 120, 121, 122, 123, 124, 125, 126, 127, 128, 129, 130, 131, 132, 133, 134, 135, 136, 137, 138, 139, 140, 141, 142, 143, 144, 145, 146, 147, 148, 149, 150, 151, 152, 153, 154, 155, 156, 157, 158, 159, 160, 161, 162, 163, 164, 165, 166, 167, 168, 169, 170, 171, 172, 173, 174, 175, 176, 177, 178, 179, 180, 181, 182, 183, 184, 185, 186, 187, 188, 189, 190, 191, 192, 193, 194, 195, 196, 197, 198, 199, 200, 201, 202, 203, 204, 205, 206, 207, 208, 209, 210, 211, 212, 213, 214, 215, 216, 217, 218, 219, 220, 221, 222, 223, 224, 225, 226, 227, 228, 229, 230, 231, 232, 233, 234, 235, 236, 237, 238, 239, 240, 241, 242, 243, 244, 245, 246, 247, 248, 249, 250, 251, 252, 253, 254, 255, 256, 257, 258, 259, 260, 261, 262, 263, 264, 265, 266, 267, 268, 269, 270, 271, 272, 273, 274, 275, 276, 277, 278, 279, 280, 281, 282, 283, 284, 285, 286, 287, 288, 289, 290, 291, 292, 293, 294, 295, 296, 297, 298, 299, 300, 301, 302, 303, 304, 305, 306, 307, 308, 309, 310, 311, 312, 313, 314, 315, 316, 317, 318, 319, 320, 321, 322, 323, 324, 325, 326, 327, 328, 329, 330, 331, 332, 333, 334, 335, 336, 337, 338, 339, 340, 341, 342, 343, 344, 345, 346, 347, 348, 349, 350, 351, 352, 353, 354, 355, 356, 357, 358, 359, 360, 361, 362, 363, 364, 365, 366, 367, 368, 369, 370, 371, 372, 373, 374, 375, 376, 377, 378, 379, 380, 381, 382, 383, 384, 385, 386, 387, 388, 389, 390, 391, 392, 393, 394, 395, 396, 397, 398, 399, 400, 401, 402, 403, 404, 405, 406, 407, 408, 409, 410, 411, 412, 413, 414, 415, 416, 417, 418, 419, 420, 421, 422, 423, 424, 425, 426, 427, 428, 429, 430, 431, 432, 433, 434, 435, 436, 437, 438, 439, 440, 441, 442, 443, 444, 445, 446, 447, 448, 449, 450, 451, 452, 453, 454, 455, 456, 457, 458, 459, 460, 461, 462, 463, 464, 465, 466, 467, 468, 469, 470, 471, 472, 473, 474, 475, 476, 477, 478, 479, 480, 481, 482, 483, 484, 485, 486, 487, 488, 489, 490, 491, 492, 493, 494, 495, 496, 497, 498, 499, and 500 nucleotides in length.

[0191] In one embodiment, the polyadenylation sequence is 50-100 nucleotides in length.

[0192] In one embodiment, the polyadenylation sequence is 50-150 nucleotides in length.

[0193] In one embodiment, the polyadenylation sequence is 50-160 nucleotides in length.

[0194] In one embodiment, the polyadenylation sequence is 50-200 nucleotides in length.

[0195] In one embodiment, the polyadenylation sequence is 60-100 nucleotides in length.

[0196] In one embodiment, the polyadenylation sequence is 60-150 nucleotides in length.

[0197] In one embodiment, the polyadenylation sequence is 60-160 nucleotides in length.

[0198] In one embodiment, the polyadenylation sequence is 60-200 nucleotides in length.

[0199] In one embodiment, the polyadenylation sequence is 70-100 nucleotides in length.

[0200] In one embodiment, the polyadenylation sequence is 70-150 nucleotides in length.

[0201] In one embodiment, the polyadenylation sequence is 70-160 nucleotides in length.

[0202] In one embodiment, the polyadenylation sequence is 70-200 nucleotides in length.

[0203] In one embodiment, the polyadenylation sequence is 80-100 nucleotides in length.

[0204] In one embodiment, the polyadenylation sequence is 80-150 nucleotides in length.

[0205] In one embodiment, the polyadenylation sequence is 80-160 nucleotides in length.

[0206] In one embodiment, the polyadenylation sequence is 80-200 nucleotides in length.

[0207] In one embodiment, the polyadenylation sequence is 90-100 nucleotides in length.

[0208] In one embodiment, the polyadenylation sequence is 90-150 nucleotides in length.

[0209] In one embodiment, the polyadenylation sequence is 90-160 nucleotides in length.

[0210] In one embodiment, the polyadenylation sequence is 90-200 nucleotides in length.

[0211] In one embodiment, the AAV particle comprises a nucleic acid sequence encoding an siRNA molecule may be located upstream of the polyadenylation sequence in an expression vector. Further, the AAV particle comprises a nucleic acid sequence encoding an siRNA molecule may be located downstream of a promoter such as, but not limited to, CMV, U6. CAG. CBA or a CBA promoter with a SV40 intron or a human betaglobin intron in an expression vector. As a non-limiting example, the AAV particle comprises a nucleic acid sequence encoding an siRNA molecule may be located within 1, 2, 3, 4, 5, 6, 7, 8, 9, 10, 11, 12, 13, 14, 15, 16, 17, 18, 19, 20, 21, 22, 23, 24, 25, 26, 27, 28, 29, 30 or more than 30 nucleotides downstream from the promoter and/or upstream of the polyadenylation sequence in an expression vector. As another non-limiting example, the AAV particle comprises a nucleic acid sequence encoding an siRNA molecule may be located within 1-5, 1-10, 1-15, 1-20, 1-25, 1-30, 5-10, 5-15, 5-20, 5-25, 5-30, 10-15, 10-20, 10-25, 10-30, 15-20, 15-25, 15-30, 20-25, 20-30 or 25-30 nucleotides downstream from the promoter and/or upstream of the polyadenylation sequence in an expression vector. As a non-limiting example, the AAV particle comprises a nucleic acid sequence encoding an siRNA molecule may be located within the first 1%, 2%, 3%, 4%, 5%, 6%, 7%, 8%, 9%, 10%, 15%, 20%, 25% or more than 25% of the nucleotides downstream from the promoter and/or upstream of the polyadenylation sequence in an expression vector. As another non-limiting example, the AAV particle comprises a nucleic acid sequence encoding an siRNA molecule may be located with the first 1-5%, 1-10%, 1-15%, 1-20%, 1-25%, 5-10%, 5-15%, 5-20%, 5-25%, 10-15%, 10-20%, 10-25%, 15-20%, 15-25%, or 20-25% downstream from the promoter and/or upstream of the polyadenylation sequence in an expression vector.

[0212] In one embodiment, the AAV particle comprises a rabbit globin polyadenylation (polyA) signal sequence.

[0213] In one embodiment, the AAV particle comprises a human growth hormone polyadenylation (polyA) signal sequence.

### Viral Genome Component: Introns

[0214] In one embodiment, the payload region comprises at least one element to enhance the expression such as one or more introns or portions thereof. Non-limiting examples of introns include, MVM (67-97 bps), F.IX truncated intron 1 (300 bps), β-globin SD/immunoglobulin heavy chain splice acceptor (250 bps), adenovirus splice donor/immunoglobin splice acceptor (500 bps), SV40 late splice donor/splice acceptor (19S/16S) (180 bps) and hybrid adenovirus splice donor/IgG splice acceptor (230 bps).

[0215] In one embodiment, the intron or intron portion may be 100-500 nucleotides in length. The intron may have a length of 80, 90, 100, 110, 120, 130, 140, 150, 160, 170, 171, 172, 173, 174, 175, 176, 177, 178, 179, 180, 190, 200, 210, 220, 230, 240, 250, 260, 270, 280, 290, 300, 310, 320, 330, 340, 350, 360, 370, 380, 390, 400, 410, 420, 430, 440, 450, 460, 470, 480, 490 or 500. The intron may have a length between 80-100, 80-120, 80-140, 80-160, 80-180, 80-200, 80-250, 80-300, 80-350, 80-400, 80-450, 80-500, 200-300, 200-400, 200-500, 300-400, 300-500, or 400-500.

[0216] In one embodiment, the AAV viral genome may comprise a promoter such as, but not limited to, CMV or U6. As a non-limiting example, the promoter for the AAV comprising the nucleic acid sequence for the siRNA molecules of the present invention is a CMV promoter. As another non-limiting example, the promoter for the AAV comprising the nucleic acid sequence for the siRNA molecules of the present invention is a U6 promoter.

[0217] In one embodiment, the AAV viral genome may comprise a CMV promoter.

[0218] In one embodiment, the AAV viral genome may comprise a U6 promoter.

[0219] In one embodiment, the AAV viral genome may comprise a CMV and a U6 promoter.

[0220] In one embodiment, the AAV viral genome may comprise a H1 promoter.

[0221] In one embodiment, the AAV viral genome may comprise a CBA promoter.

[0222] In one embodiment, the encoded siRNA molecule may be located downstream of a promoter in an expression vector such as, but not limited to, CMV, U6, H1, CBA, CAG, or a CBA promoter with an intron such as SV40 or others known in the art. Further, the encoded siRNA molecule may also be located upstream of the polyadenylation sequence in an expression vector. As a non-limiting example, the encoded siRNA molecule may be located within 1, 2, 3, 4, 5, 6, 7, 8, 9, 10, 11, 12, 13, 14, 15, 16, 17, 18, 19, 20, 21, 22, 23, 24, 25, 26, 27, 28, 29, 30 or more than 30 nucleotides downstream from the promoter and/or upstream of the polyadenylation sequence in an expression vector. As another non-limiting example, the encoded siRNA molecule may be located within 1-5, 1-10, 1-15, 1-20, 1-25, 1-30, 5-10, 5-15, 5-20, 5-25, 5-30, 10-15, 10-20, 10-25, 10-30, 15-20, 15-25, 15-30, 20-25, 20-30 or 25-30 nucleotides downstream from the promoter and/or upstream of the polyadenylation sequence in an expression vector. As a non-limiting example, the encoded siRNA molecule may be located within the first 1%, 2%, 3%, 4%, 5%, 6%, 7%, 8%, 9%, 10%, 15%, 20%, 25% or more than 25% of the nucleotides downstream from the promoter and/or upstream of the polyadenylation sequence in an expression vector. As another non-limiting example, the encoded siRNA molecule may be located with the first 1-5%, 1-10%, 1-15%, 1-20%, 1-25%, 5-10%, 5-15%, 5-20%, 5-25%, 10-15%, 10-20%, 10-25%, 15-20%, 15-25%, or 20-25% downstream from the promoter and/or upstream of the polyadenylation sequence in an expression vector.

### Viral Genome Component: Filler Sequence

[0223] In one embodiment, the viral genome comprises one or more filler sequences.

[0224] In one embodiment, the viral genome comprises one or more filler sequences in order to have the length of the viral genome be the optimal size for packaging. As a non-limiting example, the viral genome comprises at least one filler sequence in order to have the length of the viral genome be about 2.3 kb. As a non-limiting example, the viral genome comprises at least one filler sequence in order to have the length of the viral genome be about 4.6 kb.

[0225] In one embodiment, the viral genome comprises one or more filler sequences in order to reduce the likelihood that a hairpin structure of the vector genome (e.g., a modulatory polynucleotide described herein) may be read as an inverted terminal repeat (ITR) during expression and/or packaging. As a non-limiting example, the viral genome comprises at least one filler sequence in order to have the length of the viral genome be about 2.3 kb. As a non-limiting example, the viral genome comprises at least one filler sequence in order to have the length of the viral genome be about 4.6 kb

[0226] In one embodiment, the viral genome is a single stranded (ss) viral genome and comprises one or more filler sequences which have a length about between 0.1 kb-3.8 kb, such as, but not limited to, 0.1 kb, 0.2 kb, 0.3 kb, 0.4 kb, 0.5 kb, 0.6 kb, 0.7 kb, 0.8 kb, 0.9 kb, 1 kb, 1.1 kb, 1.2 kb, 1.3 kb, 1.4 kb, 1.5 kb, 1.6 kb, 1.7 kb, 1.8 kb, 1.9 kb, 2 kb, 2.1 kb, 2.2 kb, 2.3 kb, 2.4 kb, 2.5 kb, 2.6 kb, 2.7 kb, 2.8 kb, 2.9 kb, 3 kb, 3.1 kb, 3.2 kb, 3.3 kb, 3.4 kb, 3.5 kb, 3.6 kb, 3.7 kb, or 3.8 kb. As a non-limiting example, the total length filler sequence in the vector genome is 3.1 kb. As a non-limiting example, the total length filler sequence in the vector genome is 2.7 kb. As a non-limiting example, the total length filler sequence in the vector genome is 0.8 kb. As a non-limiting example, the total length filler sequence in the vector genome is 0.4 kb. As a non-limiting example, the length of each filler sequence in the vector genome is 0.8 kb. As a non-limiting example, the length of each filler sequence in the vector genome is 0.4 kb.

[0227] In one embodiment, the viral genome is a self-complementary (sc) viral genome and comprises one or more filler sequences which have a length about between 0.1 kb-1.5 kb, such as, but not limited to, 0.1 kb, 0.2 kb, 0.3 kb, 0.4 kb, 0.5 kb, 0.6 kb, 0.7 kb, 0.8 kb, 0.9 kb, 1 kb, 1.1 kb, 1.2 kb, 1.3 kb, 1.4 kb, or 1.5 kb. As a non-limiting example, the total length filler sequence in the vector genome is 0.8 kb. As a non-limiting example, the total length filler sequence in the vector genome is 0.4 kb. As a non-limiting example, the length of each filler sequence in the vector genome is 0.8 kb. As a non-limiting example, the length of each filler sequence in the vector genome is 0.4 kb.

[0228] In one embodiment, the viral genome comprises any portion of a filler sequence. The viral genome may comprise 1%, 2%, 3%, 4%, 5%, 6%, 7%, 8%, 9%, 10%, 15%, 20%, 25%, 30%, 35%, 40%, 45%, 50%, 55%, 60%, 65%, 70%, 75%, 80%, 85%, 90%, 95%, or 99% of a filler sequence.

[0229] In one embodiment, the viral genome is a single stranded (ss) viral genome and comprises one or more filler sequences in order to have the length of the viral genome be about 4.6 kb. As a non-limiting example, the viral genome comprises at least one filler sequence and the filler sequence is located 3′ to the 5′ ITR sequence. As a non-limiting example, the viral genome comprises at least one filler sequence and the filler sequence is located 5′ to a promoter sequence. As a non-limiting example, the viral genome comprises at least one filler sequence and the filler sequence is located 3′ to the polyadenylation signal sequence. As a non-limiting example, the viral genome comprises at least one filler sequence and the filler sequence is located 5′ to the 3′ ITR sequence. As a non-limiting example, the viral genome comprises at least one filler sequence, and the filler sequence is located between two intron sequences. As a non-limiting example, the viral genome comprises at least one filler sequence, and the filler sequence is located within an intron sequence. As a non-limiting example, the viral genome comprises two filler sequences, and the first filler sequence is located 3′ to the 5′ ITR sequence and the second filler sequence is located 3′ to the polyadenylation signal sequence. As a non-limiting example, the viral genome comprises two filler sequences, and the first filler sequence is located 5′ to a promoter sequence and the second filler sequence is located 3′ to the polyadenylation signal sequence. As a non-limiting example, the viral genome comprises two filler sequences, and the first filler sequence is located 3′ to the 5′ ITR sequence and the second filler sequence is located 5′ to the 5′ ITR sequence.

[0230] In one embodiment, the viral genome is a self-complementary (se) viral genome and comprises one or more filler sequences in order to have the length of the viral genome be about 2.3 kb. As a non-limiting example, the viral genome comprises at least one filler sequence and the filler sequence is located 3′ to the 5′ ITR sequence. As a non-limiting example, the viral genome comprises at least one filler sequence and the filler sequence is located 5′ to a promoter sequence. As a non-limiting example, the viral genome comprises at least one filler sequence and the filler sequence is located 3′ to the polyadenylation signal sequence. As a non-limiting example, the viral genome comprises at least one filler sequence and the filler sequence is located 5′ to the 3′ ITR sequence. As a non-limiting example, the viral genome comprises at least one filler sequence, and the filler sequence is located between two intron sequences. As a non-limiting example, the viral genome comprises at least one filler sequence, and the filler sequence is located within an intron sequence. As a non-limiting example, the viral genome comprises two filler sequences, and the first filler sequence is located 3′ to the 5′ ITR sequence and the second filler sequence is located 3′ to the polyadenylation signal sequence. As a non-limiting example, the viral genome comprises two filler sequences, and the first filler sequence is located 5′ to a promoter sequence and the second filler sequence is located 3′ to the polyadenylation signal sequence. As a non-limiting example, the viral genome comprises two filler sequences, and the first filler sequence is located 3′ to the 5′ ITR sequence and the second filler sequence is located 5′ to the 5′ ITR sequence.

[0231] In one embodiment, the viral genome may comprise one or more filler sequences between one of more regions of the viral genome. In one embodiment, the filler region may be located before a region such as, but not limited to, a payload region, an inverted terminal repeat (ITR), a promoter region, an intron region, an enhancer region, a polyadenylation signal sequence region, a multiple cloning site (MCS) region, and/or an exon region. In one embodiment, the filler region may be located after a region such as, but not limited to, a payload region, an inverted terminal repeat (ITR), a promoter region, an intron region, an enhancer region, a polyadenylation signal sequence region, a multiple cloning site (MCS) region, and/or an exon region. In one embodiment, the filler region may be located before and after a region such as, but not limited to, a payload region, an inverted terminal repeat (ITR), a promoter region, an intron region, an enhancer region, a polyadenylation signal sequence region, a multiple cloning site (MCS) region, and/or an exon region.

[0232] In one embodiment, the viral genome may comprise one or more filler sequences which bifurcates at least one region of the viral genome. The bifurcated region of the viral genome may comprise 1%, 2%, 3%, 4%, 5%, 6%, 7%, 8%, 9%, 10%, 15%, 20%, 25%, 30%, 35%, 40%, 45%, 50%, 55%, 60%, 65%, 70%, 75%, 80%, 85%, 90%, 95%, or 99% of the of the region to the 5′ of the filler sequence region. As a non-limiting example, the filler sequence may bifurcate at least one region so that 10% of the region is located 5′ to the filler sequence and 90% of the region is located 3′ to the filler sequence. As a non-limiting example, the filler sequence may bifurcate at least one region so that 20% of the region is located 5′ to the filler sequence and 80% of the region is located 3′ to the filler sequence. As a non-limiting example, the filler sequence may bifurcate at least one region so that 30% of the region is located 5′ to the filler sequence and 70% of the region is located 3′ to the filler sequence. As a non-limiting example, the filler sequence may bifurcate at least one region so that 40% of the region is located 5′ to the filler sequence and 60% of the region is located 3′ to the filler sequence. As a non-limiting example, the filler sequence may bifurcate at least one region so that 50% of the region is located 5′ to the filler sequence and 50% of the region is located 3′ to the filler sequence. As a non-limiting example, the filler sequence may bifurcate at least one region so that 60% of the region is located 5′ to the filler sequence and 40% of the region is located 3′ to the filler sequence. As a non-limiting example, the filler sequence may bifurcate at least one region so that 70% of the region is located 5′ to the filler sequence and 30% of the region is located 3′ to the filler sequence. As a non-limiting example, the filler sequence may bifurcate at least one region so that 80% of the region is located 5′ to the filler sequence and 20% of the region is located 3′ to the filler sequence. As a non-limiting example, the filler sequence may bifurcate at least one region so that 90% of the region is located 5′ to the filler sequence and 10% of the region is located 3′ to the filler sequence.

[0233] In one embodiment, the viral genome comprises a filler sequence after the 5′ ITR.

[0234] In one embodiment, the viral genome comprises a filler sequence after the promoter region. In one embodiment, the viral genome comprises a filler sequence after the payload region. In one embodiment, the viral genome comprises a filler sequence after the intron region. In one embodiment, the viral genome comprises a filler sequence after the enhancer region. In one embodiment, the viral genome comprises a filler sequence after the polyadenylation signal sequence region. In one embodiment, the viral genome comprises a filler sequence after the MCS region. In one embodiment, the viral genome comprises a filler sequence after the exon region.

[0235] In one embodiment, the viral genome comprises a filler sequence before the promoter region. In one embodiment, the viral genome comprises a filler sequence before the payload region. In one embodiment, the viral genome comprises a filler sequence before the intron region. In one embodiment, the viral genome comprises a filler sequence before the enhancer region. In one embodiment, the viral genome comprises a filler sequence before the polyadenylation signal sequence region. In one embodiment, the viral genome comprises a filler sequence before the MCS region. In one embodiment, the viral genome comprises a filler sequence before the exon region.

[0236] In one embodiment, the viral genome comprises a filler sequence before the 3′ ITR.

[0237] In one embodiment, a filler sequence may be located between two regions, such as, but not limited to, the 5′ ITR and the promoter region. In one embodiment, a filler sequence may be located between two regions, such as, but not limited to, the 5′ ITR and the payload region. In one embodiment, a filler sequence may be located between two regions, such as, but not limited to, the 5′ ITR and the intron region. In one embodiment, a filler sequence may be located between two regions, such as, but not limited to, the 5′ ITR and the enhancer region. In one embodiment, a filler sequence may be located between two regions, such as, but not limited to, the 5′ ITR and the polyadenylation signal sequence region. In one embodiment, a filler sequence may be located between two regions, such as, but not limited to, the 5′ ITR and the MCS region.

[0238] In one embodiment, a filler sequence may be located between two regions, such as, but not limited to, the 5′ ITR and the exon region.

[0239] In one embodiment, a filler sequence may be located between two regions, such as, but not limited to, the promoter region and the payload region. In one embodiment, a filler sequence may be located between two regions, such as, but not limited to, the promoter region and the intron region. In one embodiment, a filler sequence may be located between two regions, such as, but not limited to, the promoter region and the enhancer region. In one embodiment, a filler sequence may be located between two regions, such as, but not limited to, the promoter region and the polyadenylation signal sequence region. In one embodiment, a filler sequence may be located between two regions, such as, but not limited to, the promoter region and the MCS region. In one embodiment, a filler sequence may be located between two regions, such as, but not limited to, the promoter region and the exon region. In one embodiment, a filler sequence may be located between two regions, such as, but not limited to, the promoter region and the 3′ ITR.

[0240] In one embodiment, a filler sequence may be located between two regions, such as, but not limited to, the payload region and the intron region. In one embodiment, a filler sequence may be located between two regions, such as, but not limited to, the payload region and the enhancer region. In one embodiment, a filler sequence may be located between two regions, such as, but not limited to, the payload region and the polyadenylation signal sequence region. In one embodiment, a filler sequence may be located between two regions, such as, but not limited to, the payload region and the MCS region. In one embodiment, a filler sequence may be located between two regions, such as, but not limited to, the payload region and the exon region.

[0241] In one embodiment, a filler sequence may be located between two regions, such as, but not limited to, the payload region and the 3′ ITR.

[0242] In one embodiment, a filler sequence may be located between two regions, such as, but not limited to, the intron region and the enhancer region. In one embodiment, a filler sequence may be located between two regions, such as, but not limited to, the intron region and the polyadenylation signal sequence region. In one embodiment, a filler sequence may be located between two regions, such as, but not limited to, the intron region and the MCS region. In one embodiment, a filler sequence may be located between two regions, such as, but not limited to, the intron region and the exon region. In one embodiment, a filler sequence may be located between two regions, such as, but not limited to, the intron region and the 3′ ITR. In one embodiment, a filler sequence may be located between two regions, such as, but not limited to, the enhancer region and the polyadenylation signal sequence region. In one embodiment, a filler sequence may be located between two regions, such as, but not limited to, the enhancer region and the MCS region. In one embodiment, a filler sequence may be located between two regions, such as, but not limited to, the enhancer region and the exon region. In one embodiment, a filler sequence may be located between two regions, such as, but not limited to, the enhancer region and the 3′ ITR.

[0243] In one embodiment, a filler sequence may be located between two regions, such as, but not limited to, the polyadenylation signal sequence region and the MCS region. In one embodiment, a filler sequence may be located between two regions, such as, but not limited to, the polyadenylation signal sequence region and the exon region. In one embodiment, a filler sequence may be located between two regions, such as, but not limited to, the polyadenylation signal sequence region and the 3′ ITR.

[0244] In one embodiment, a filler sequence may be located between two regions, such as, but not limited to, the MCS region and the exon region. In one embodiment, a filler sequence may be located between two regions, such as, but not limited to, the MCS region and the 3′ ITR.

[0245] In one embodiment, a filler sequence may be located between two regions, such as, but not limited to, the exon region and the 3′ ITR.

[0246] In one embodiment, a viral genome may comprise two filler sequences, the first filler sequence may be located between the 5′ ITR and promoter region, and the second filler sequence may be located between the promoter region and payload region. In one embodiment, a viral genome may comprise two filler sequences, the first filler sequence may be located between the 5′ ITR and promoter region, and the second filler sequence may be located between the promoter region and intron region. In one embodiment, a viral genome may comprise two filler sequences, the first filler sequence may be located between the 5′ ITR and promoter region, and the second filler sequence may be located between the promoter region and enhancer region. In one embodiment, a viral genome may comprise two filler sequences, the first filler sequence may be located between the 5′ ITR and promoter region, and the second filler sequence may be located between the promoter region and polyadenylation signal sequence region. In one embodiment, a viral genome may comprise two filler sequences, the first filler sequence may be located between the 5′ ITR and promoter region, and the second filler sequence may be located between the promoter region and MCS region. In one embodiment, a viral genome may comprise two filler sequences, the first filler sequence may be located between the 5′ ITR and promoter region, and the second filler sequence may be located between the promoter region and exon region. In one embodiment, a viral genome may comprise two filler sequences, the first filler sequence may be located between the 5′ ITR and promoter region, and the second filler sequence may be located between the promoter region and 3′ ITR. In one embodiment, a viral genome may comprise two filler sequences, the first filler sequence may be located between the 5′ ITR and promoter region, and the second filler sequence may be located between the payload region and intron region. In one embodiment, a viral genome may comprise two filler sequences, the first filler sequence may be located between the 5′ ITR and promoter region, and the second filler sequence may be located between the payload region and enhancer region. In one embodiment, a viral genome may comprise two filler sequences, the first filler sequence may be located between the 5′ ITR and promoter region, and the second filler sequence may be located between the payload region and polyadenylation signal sequence region. In one embodiment, a viral genome may comprise two filler sequences, the first filler sequence may be located between the 5′ ITR and promoter region, and the second filler sequence may be located between the payload region and MCS region. In one embodiment, a viral genome may comprise two filler sequences, the first filler sequence may be located between the 5′ ITR and promoter region, and the second filler sequence may be located between the payload region and exon region. In one embodiment, a viral genome may comprise two filler sequences, the first filler sequence may be located between the 5′ ITR and promoter region, and the second filler sequence may be located between the payload region and 3′ ITR. In one embodiment, a viral genome may comprise two filler sequences, the first filler sequence may be located between the 5′ ITR and promoter region, and the second filler sequence may be located between the intron region and enhancer region. In one embodiment, a viral genome may comprise two filler sequences, the first filler sequence may be located between the 5′ ITR and promoter region, and the second filler sequence may be located between the intron region and polyadenylation signal sequence region. In one embodiment, a viral genome may comprise two filler sequences, the first filler sequence may be located between the 5′ ITR and promoter region, and the second filler sequence may be located between the intron region and MCS region. In one embodiment, a viral genome may comprise two filler sequences, the first filler sequence may be located between the 5′ ITR and promoter region, and the second filler sequence may be located between the intron region and exon region. In one embodiment, a viral genome may comprise two filler sequences, the first filler sequence may be located between the 5′ ITR and promoter region, and the second filler sequence may be located between the intron region and 3′ ITR. In one embodiment, a viral genome may comprise two filler sequences, the first filler sequence may be located between the 5′ ITR and promoter region, and the second filler sequence may be located between the enhancer region and polyadenylation signal sequence region. In one embodiment, a viral genome may comprise two filler sequences, the first filler sequence may be located between the 5′ ITR and promoter region, and the second filler sequence may be located between the enhancer region and MCS region. In one embodiment, a viral genome may comprise two filler sequences, the first filler sequence may be located between the 5′ ITR and promoter region, and the second filler sequence may be located between the enhancer region and exon region. In one embodiment, a viral genome may comprise two filler sequences, the first filler sequence may be located between the 5′ ITR and promoter region, and the second filler sequence may be located between the enhancer region and 3′ ITR. In one embodiment, a viral genome may comprise two filler sequences, the first filler sequence may be located between the 5′ ITR and promoter region, and the second filler sequence may be located between the polyadenylation signal sequence region and MCS region. In one embodiment, a viral genome may comprise two filler sequences, the first filler sequence may be located between the 5′ ITR and promoter region, and the second filler sequence may be located between the polyadenylation signal sequence region and exon region. In one embodiment, a viral genome may comprise two filler sequences, the first filler sequence may be located between the 5′ ITR and promoter region, and the second filler sequence may be located between the polyadenylation signal sequence region and 3′ ITR. In one embodiment, a viral genome may comprise two filler sequences, the first filler sequence may be located between the 5′ ITR and promoter region, and the second filler sequence may be located between the MCS region and exon region. In one embodiment, a viral genome may comprise two filler sequences, the first filler sequence may be located between the 5′ ITR and promoter region, and the second filler sequence may be located between the MCS region and 3′ ITR. In one embodiment, a viral genome may comprise two filler sequences, the first filler sequence may be located between the 5′ ITR and promoter region, and the second filler sequence may be located between the exon region and 3′ ITR.

[0247] In one embodiment, a viral genome may comprise two filler sequences, the first filler sequence may be located between the 5′ ITR and payload region, and the second filler sequence may be located between the promoter region and payload region. In one embodiment, a viral genome may comprise two filler sequences, the first filler sequence may be located between the 5′ ITR and payload region, and the second filler sequence may be located between the promoter region and intron region. In one embodiment, a viral genome may comprise two filler sequences, the first filler sequence may be located between the 5′ ITR and payload region, and the second filler sequence may be located between the promoter region and enhancer region. In one embodiment, a viral genome may comprise two filler sequences, the first filler sequence may be located between the 5′ ITR and payload region, and the second filler sequence may be located between the promoter region and polyadenylation signal sequence region. In one embodiment, a viral genome may comprise two filler sequences, the first filler sequence may be located between the 5′ ITR and payload region, and the second filler sequence may be located between the promoter region and MCS region. In one embodiment, a viral genome may comprise two filler sequences, the first filler sequence may be located between the 5′ ITR and payload region, and the second filler sequence may be located between the promoter region and exon region. In one embodiment, a viral genome may comprise two filler sequences, the first filler sequence may be located between the 5′ ITR and payload region, and the second filler sequence may be located between the promoter region and 3′ ITR. In one embodiment, a viral genome may comprise two filler sequences, the first filler sequence may be located between the 5′ ITR and payload region, and the second filler sequence may be located between the payload region and intron region. In one embodiment, a viral genome may comprise two filler sequences, the first filler sequence may be located between the 5′ ITR and payload region, and the second filler sequence may be located between the payload region and enhancer region. In one embodiment, a viral genome may comprise two filler sequences, the first filler sequence may be located between the 5′ ITR and payload region, and the second filler sequence may be located between the payload region and polyadenylation signal sequence region. In one embodiment, a viral genome may comprise two filler sequences, the first filler sequence may be located between the 5′ ITR and payload region, and the second filler sequence may be located between the payload region and MCS region. In one embodiment, a viral genome may comprise two filler sequences, the first filler sequence may be located between the 5′ ITR and payload region, and the second filler sequence may be located between the payload region and exon region. In one embodiment, a viral genome may comprise two filler sequences, the first filler sequence may be located between the 5′ ITR and payload region, and the second filler sequence may be located between the payload region and 3′ ITR. In one embodiment, a viral genome may comprise two filler sequences, the first filler sequence may be located between the 5′ ITR and payload region, and the second filler sequence may be located between the intron region and enhancer region. In one embodiment, a viral genome may comprise two filler sequences, the first filler sequence may be located between the 5′ ITR and payload region, and the second filler sequence may be located between the intron region and polyadenylation signal sequence region. In one embodiment, a viral genome may comprise two filler sequences, the first filler sequence may be located between the 5′ ITR and payload region, and the second filler sequence may be located between the intron region and MCS region. In one embodiment, a viral genome may comprise two filler sequences, the first filler sequence may be located between the 5′ ITR and payload region, and the second filler sequence may be located between the intron region and exon region. In one embodiment, a viral genome may comprise two filler sequences, the first filler sequence may be located between the 5′ ITR and payload region, and the second filler sequence may be located between the intron region and 3′ ITR. In one embodiment, a viral genome may comprise two filler sequences, the first filler sequence may be located between the 5′ ITR and payload region, and the second filler sequence may be located between the enhancer region and polyadenylation signal sequence region. In one embodiment, a viral genome may comprise two filler sequences, the first filler sequence may be located between the 5′ ITR and payload region, and the second filler sequence may be located between the enhancer region and MCS region. In one embodiment, a viral genome may comprise two filler sequences, the first filler sequence may be located between the 5′ ITR and payload region, and the second filler sequence may be located between the enhancer region and exon region. In one embodiment, a viral genome may comprise two filler sequences, the first filler sequence may be located between the 5′ ITR and payload region, and the second filler sequence may be located between the enhancer region and 3′ ITR. In one embodiment, a viral genome may comprise two filler sequences, the first filler sequence may be located between the 5′ ITR and payload region, and the second filler sequence may be located between the polyadenylation signal sequence region and MCS region. In one embodiment, a viral genome may comprise two filler sequences, the first filler sequence may be located between the 5′ ITR and payload region, and the second filler sequence may be located between the polyadenylation signal sequence region and exon region. In one embodiment, a viral genome may comprise two filler sequences, the first filler sequence may be located between the 5′ ITR and payload region, and the second filler sequence may be located between the polyadenylation signal sequence region and 3′ ITR. In one embodiment, a viral genome may comprise two filler sequences, the first filler sequence may be located between the 5′ ITR and payload region, and the second filler sequence may be located between the MCS region and exon region. In one embodiment, a viral genome may comprise two filler sequences, the first filler sequence may be located between the 5′ ITR and payload region, and the second filler sequence may be located between the MCS region and 3′ ITR. In one embodiment, a viral genome may comprise two filler sequences, the first filler sequence may be located between the 5′ ITR and payload region, and the second filler sequence may be located between the exon region and 3′ ITR.

[0248] In one embodiment, a viral genome may comprise two filler sequences, the first filler sequence may be located between the 5′ ITR and intron region, and the second filler sequence may be located between the promoter region and payload region. In one embodiment, a viral genome may comprise two filler sequences, the first filler sequence may be located between the 5′ ITR and intron region, and the second filler sequence may be located between the promoter region and intron region. In one embodiment, a viral genome may comprise two filler sequences, the first filler sequence may be located between the 5′ ITR and intron region, and the second filler sequence may be located between the promoter region and enhancer region. In one embodiment, a viral genome may comprise two filler sequences, the first filler sequence may be located between the 5′ ITR and intron region, and the second filler sequence may be located between the promoter region and polyadenylation signal sequence region. In one embodiment, a viral genome may comprise two filler sequences, the first filler sequence may be located between the 5′ ITR and intron region, and the second filler sequence may be located between the promoter region and MCS region. In one embodiment, a viral genome may comprise two filler sequences, the first filler sequence may be located between the 5′ ITR and intron region, and the second filler sequence may be located between the promoter region and exon region. In one embodiment, a viral genome may comprise two filler sequences, the first filler sequence may be located between the 5′ ITR and intron region, and the second filler sequence may be located between the promoter region and 3′ ITR. In one embodiment, a viral genome may comprise two filler sequences, the first filler sequence may be located between the 5′ ITR and intron region, and the second filler sequence may be located between the payload region and intron region. In one embodiment, a viral genome may comprise two filler sequences, the first filler sequence may be located between the 5′ ITR and intron region, and the second filler sequence may be located between the payload region and enhancer region. In one embodiment, a viral genome may comprise two filler sequences, the first filler sequence may be located between the 5′ ITR and intron region, and the second filler sequence may be located between the payload region and polyadenylation signal sequence region. In one embodiment, a viral genome may comprise two filler sequences, the first filler sequence may be located between the 5′ ITR and intron region, and the second filler sequence may be located between the payload region and MCS region. In one embodiment, a viral genome may comprise two filler sequences, the first filler sequence may be located between the 5′ ITR and intron region, and the second filler sequence may be located between the payload region and exon region. In one embodiment, a viral genome may comprise two filler sequences, the first filler sequence may be located between the 5′ ITR and intron region, and the second filler sequence may be located between the payload region and 3′ ITR. In one embodiment, a viral genome may comprise two filler sequences, the first filler sequence may be located between the 5′ ITR and intron region, and the second filler sequence may be located between the intron region and enhancer region. In one embodiment, a viral genome may comprise two filler sequences, the first filler sequence may be located between the 5′ ITR and intron region, and the second filler sequence may be located between the intron region and polyadenylation signal sequence region. In one embodiment, a viral genome may comprise two filler sequences, the first filler sequence may be located between the 5′ ITR and intron region, and the second filler sequence may be located between the intron region and MCS region. In one embodiment, a viral genome may comprise two filler sequences, the first filler sequence may be located between the 5′ ITR and intron region, and the second filler sequence may be located between the intron region and exon region. In one embodiment, a viral genome may comprise two filler sequences, the first filler sequence may be located between the 5′ ITR and intron region, and the second filler sequence may be located between the intron region and 3′ ITR. In one embodiment, a viral genome may comprise two filler sequences, the first filler sequence may be located between the 5′ ITR and intron region, and the second filler sequence may be located between the enhancer region and polyadenylation signal sequence region. In one embodiment, a viral genome may comprise two filler sequences, the first filler sequence may be located between the 5′ ITR and intron region, and the second filler sequence may be located between the enhancer region and MCS region. In one embodiment, a viral genome may comprise two filler sequences, the first filler sequence may be located between the 5′ ITR and intron region, and the second filler sequence may be located between the enhancer region and exon region. In one embodiment, a viral genome may comprise two filler sequences, the first filler sequence may be located between the 5′ ITR and intron region, and the second filler sequence may be located between the enhancer region and 3′ ITR. In one embodiment, a viral genome may comprise two filler sequences, the first filler sequence may be located between the 5′ ITR and intron region, and the second filler sequence may be located between the polyadenylation signal sequence region and MCS region. In one embodiment, a viral genome may comprise two filler sequences, the first filler sequence may be located between the 5′ ITR and intron region, and the second filler sequence may be located between the polyadenylation signal sequence region and exon region. In one embodiment, a viral genome may comprise two filler sequences, the first filler sequence may be located between the 5′ ITR and intron region, and the second filler sequence may be located between the polyadenylation signal sequence region and 3′ ITR. In one embodiment, a viral genome may comprise two filler sequences, the first filler sequence may be located between the 5′ ITR and intron region, and the second filler sequence may be located between the MCS region and exon region. In one embodiment, a viral genome may comprise two filler sequences, the first filler sequence may be located between the 5′ ITR and intron region, and the second filler sequence may be located between the MCS region and 3′ ITR. In one embodiment, a viral genome may comprise two filler sequences, the first filler sequence may be located between the 5′ ITR and intron region, and the second filler sequence may be located between the exon region and 3′ ITR.

[0249] In one embodiment, a viral genome may comprise two filler sequences, the first filler sequence may be located between the 5′ ITR and enhancer region, and the second filler sequence may be located between the promoter region and payload region. In one embodiment, a viral genome may comprise two filler sequences, the first filler sequence may be located between the 5′ ITR and enhancer region, and the second filler sequence may be located between the promoter region and intron region. In one embodiment, a viral genome may comprise two filler sequences, the first filler sequence may be located between the 5′ ITR and enhancer region, and the second filler sequence may be located between the promoter region and enhancer region. In one embodiment, a viral genome may comprise two filler sequences, the first filler sequence may be located between the 5′ ITR and enhancer region, and the second filler sequence may be located between the promoter region and polyadenylation signal sequence region. In one embodiment, a viral genome may comprise two filler sequences, the first filler sequence may be located between the 5′ ITR and enhancer region, and the second filler sequence may be located between the promoter region and MCS region. In one embodiment, a viral genome may comprise two filler sequences, the first filler sequence may be located between the 5′ ITR and enhancer region, and the second filler sequence may be located between the promoter region and exon region. In one embodiment, a viral genome may comprise two filler sequences, the first filler sequence may be located between the 5′ ITR and enhancer region, and the second filler sequence may be located between the promoter region and 3′ ITR. In one embodiment, a viral genome may comprise two filler sequences, the first filler sequence may be located between the 5′ ITR and enhancer region, and the second filler sequence may be located between the payload region and intron region. In one embodiment, a viral genome may comprise two filler sequences, the first filler sequence may be located between the 5′ ITR and enhancer region, and the second filler sequence may be located between the payload region and enhancer region. In one embodiment, a viral genome may comprise two filler sequences, the first filler sequence may be located between the 5′ ITR and enhancer region, and the second filler sequence may be located between the payload region and polyadenylation signal sequence region. In one embodiment, a viral genome may comprise two filler sequences, the first filler sequence may be located between the 5′ ITR and enhancer region, and the second filler sequence may be located between the payload region and MCS region. In one embodiment, a viral genome may comprise two filler sequences, the first filler sequence may be located between the 5′ ITR and enhancer region, and the second filler sequence may be located between the payload region and exon region. In one embodiment, a viral genome may comprise two filler sequences, the first filler sequence may be located between the 5′ ITR and enhancer region, and the second filler sequence may be located between the payload region and 3′ ITR. In one embodiment, a viral genome may comprise two filler sequences, the first filler sequence may be located between the 5′ ITR and enhancer region, and the second filler sequence may be located between the intron region and enhancer region. In one embodiment, a viral genome may comprise two filler sequences, the first filler sequence may be located between the 5′ ITR and enhancer region, and the second filler sequence may be located between the intron region and polyadenylation signal sequence region. In one embodiment, a viral genome may comprise two filler sequences, the first filler sequence may be located between the 5′ ITR and enhancer region, and the second filler sequence may be located between the intron region and MCS region. In one embodiment, a viral genome may comprise two filler sequences, the first filler sequence may be located between the 5′ ITR and enhancer region, and the second filler sequence may be located between the intron region and exon region. In one embodiment, a viral genome may comprise two filler sequences, the first filler sequence may be located between the 5′ ITR and enhancer region, and the second filler sequence may be located between the intron region and 3′ ITR. In one embodiment, a viral genome may comprise two filler sequences, the first filler sequence may be located between the 5′ ITR and enhancer region, and the second filler sequence may be located between the enhancer region and polyadenylation signal sequence region. In one embodiment, a viral genome may comprise two filler sequences, the first filler sequence may be located between the 5′ ITR and enhancer region, and the second filler sequence may be located between the enhancer region and MCS region. In one embodiment, a viral genome may comprise two filler sequences, the first filler sequence may be located between the 5′ ITR and enhancer region, and the second filler sequence may be located between the enhancer region and exon region. In one embodiment, a viral genome may comprise two filler sequences, the first filler sequence may be located between the 5′ ITR and enhancer region, and the second filler sequence may be located between the enhancer region and 3′ ITR. In one embodiment, a viral genome may comprise two filler sequences, the first filler sequence may be located between the 5′ ITR and enhancer region, and the second filler sequence may be located between the polyadenylation signal sequence region and MCS region. In one embodiment, a viral genome may comprise two filler sequences, the first filler sequence may be located between the 5′ ITR and enhancer region, and the second filler sequence may be located between the polyadenylation signal sequence region and exon region. In one embodiment, a viral genome may comprise two filler sequences, the first filler sequence may be located between the 5′ ITR and enhancer region, and the second filler sequence may be located between the polyadenylation signal sequence region and 3′ ITR. In one embodiment, a viral genome may comprise two filler sequences, the first filler sequence may be located between the 5′ ITR and enhancer region, and the second filler sequence may be located between the MCS region and exon region. In one embodiment, a viral genome may comprise two filler sequences, the first filler sequence may be located between the 5′ ITR and enhancer region, and the second filler sequence may be located between the MCS region and 3′ ITR. In one embodiment, a viral genome may comprise two filler sequences, the first filler sequence may be located between the 5′ ITR and enhancer region, and the second filler sequence may be located between the exon region and 3′ ITR.

[0250] In one embodiment, a viral genome may comprise two filler sequences, the first filler sequence may be located between the 5′ ITR and polyadenylation signal sequence region, and the second filler sequence may be located between the promoter region and payload region. In one embodiment, a viral genome may comprise two filler sequences, the first filler sequence may be located between the 5′ ITR and polyadenylation signal sequence region, and the second filler sequence may be located between the promoter region and intron region. In one embodiment, a viral genome may comprise two filler sequences, the first filler sequence may be located between the 5′ ITR and polyadenylation signal sequence region, and the second filler sequence may be located between the promoter region and enhancer region. In one embodiment, a viral genome may comprise two filler sequences, the first filler sequence may be located between the 5′ ITR and polyadenylation signal sequence region, and the second filler sequence may be located between the promoter region and polyadenylation signal sequence region. In one embodiment, a viral genome may comprise two filler sequences, the first filler sequence may be located between the 5′ ITR and polyadenylation signal sequence region, and the second filler sequence may be located between the promoter region and MCS region. In one embodiment, a viral genome may comprise two filler sequences, the first filler sequence may be located between the 5′ ITR and polyadenylation signal sequence region, and the second filler sequence may be located between the promoter region and exon region. In one embodiment, a viral genome may comprise two filler sequences, the first filler sequence may be located between the 5′ ITR and polyadenylation signal sequence region, and the second filler sequence may be located between the promoter region and 3′ ITR. In one embodiment, a viral genome may comprise two filler sequences, the first filler sequence may be located between the 5′ ITR and polyadenylation signal sequence region, and the second filler sequence may be located between the payload region and intron region. In one embodiment, a viral genome may comprise two filler sequences, the first filler sequence may be located between the 5′ ITR and polyadenylation signal sequence region, and the second filler sequence may be located between the payload region and enhancer region. In one embodiment, a viral genome may comprise two filler sequences, the first filler sequence may be located between the 5′ ITR and polyadenylation signal sequence region, and the second filler sequence may be located between the payload region and polyadenylation signal sequence region. In one embodiment, a viral genome may comprise two filler sequences, the first filler sequence may be located between the 5′ ITR and polyadenylation signal sequence region, and the second filler sequence may be located between the payload region and MCS region. In one embodiment, a viral genome may comprise two filler sequences, the first filler sequence may be located between the 5′ ITR and polyadenylation signal sequence region, and the second filler sequence may be located between the payload region and exon region. In one embodiment, a viral genome may comprise two filler sequences, the first filler sequence may be located between the 5′ ITR and polyadenylation signal sequence region, and the second filler sequence may be located between the payload region and 3′ ITR. In one embodiment, a viral genome may comprise two filler sequences, the first filler sequence may be located between the 5′ ITR and polyadenylation signal sequence region, and the second filler sequence may be located between the intron region and enhancer region. In one embodiment, a viral genome may comprise two filler sequences, the first filler sequence may be located between the 5′ ITR and polyadenylation signal sequence region, and the second filler sequence may be located between the intron region and polyadenylation signal sequence region. In one embodiment, a viral genome may comprise two filler sequences, the first filler sequence may be located between the 5′ ITR and polyadenylation signal sequence region, and the second filler sequence may be located between the intron region and MCS region. In one embodiment, a viral genome may comprise two filler sequences, the first filler sequence may be located between the 5′ ITR and polyadenylation signal sequence region, and the second filler sequence may be located between the intron region and exon region. In one embodiment, a viral genome may comprise two filler sequences, the first filler sequence may be located between the 5′ ITR and polyadenylation signal sequence region, and the second filler sequence may be located between the intron region and 3′ ITR. In one embodiment, a viral genome may comprise two filler sequences, the first filler sequence may be located between the 5′ ITR and polyadenylation signal sequence region, and the second filler sequence may be located between the enhancer region and polyadenylation signal sequence region. In one embodiment, a viral genome may comprise two filler sequences, the first filler sequence may be located between the 5′ ITR and polyadenylation signal sequence region, and the second filler sequence may be located between the enhancer region and MCS region. In one embodiment, a viral genome may comprise two filler sequences, the first filler sequence may be located between the 5′ ITR and polyadenylation signal sequence region, and the second filler sequence may be located between the enhancer region and exon region. In one embodiment, a viral genome may comprise two filler sequences, the first filler sequence may be located between the 5′ ITR and polyadenylation signal sequence region, and the second filler sequence may be located between the enhancer region and 3′ ITR. In one embodiment, a viral genome may comprise two filler sequences, the first filler sequence may be located between the 5′ ITR and polyadenylation signal sequence region, and the second filler sequence may be located between the polyadenylation signal sequence region and MCS region. In one embodiment, a viral genome may comprise two filler sequences, the first filler sequence may be located between the 5′ ITR and polyadenylation signal sequence region, and the second filler sequence may be located between the polyadenylation signal sequence region and exon region. In one embodiment, a viral genome may comprise two filler sequences, the first filler sequence may be located between the 5′ ITR and polyadenylation signal sequence region, and the second filler sequence may be located between the polyadenylation signal sequence region and 3′ ITR. In one embodiment, a viral genome may comprise two filler sequences, the first filler sequence may be located between the 5′ ITR and polyadenylation signal sequence region, and the second filler sequence may be located between the MCS region and exon region. In one embodiment, a viral genome may comprise two filler sequences, the first filler sequence may be located between the 5′ ITR and polyadenylation signal sequence region, and the second filler sequence may be located between the MCS region and 3′ ITR. In one embodiment, a viral genome may comprise two filler sequences, the first filler sequence may be located between the 5′ ITR and polyadenylation signal sequence region, and the second filler sequence may be located between the exon region and 3′ ITR.

[0251] In one embodiment, a viral genome may comprise two filler sequences, the first filler sequence may be located between the 5′ ITR and MCS region, and the second filler sequence may be located between the promoter region and payload region. In one embodiment, a viral genome may comprise two filler sequences, the first filler sequence may be located between the 5′ ITR and MCS region, and the second filler sequence may be located between the promoter region and intron region. In one embodiment, a viral genome may comprise two filler sequences, the first filler sequence may be located between the 5′ ITR and MCS region, and the second filler sequence may be located between the promoter region and enhancer region. In one embodiment, a viral genome may comprise two filler sequences, the first filler sequence may be located between the 5′ ITR and MCS region, and the second filler sequence may be located between the promoter region and polyadenylation signal sequence region. In one embodiment, a viral genome may comprise two filler sequences, the first filler sequence may be located between the 5′ ITR and MCS region, and the second filler sequence may be located between the promoter region and MCS region. In one embodiment, a viral genome may comprise two filler sequences, the first filler sequence may be located between the 5′ ITR and MCS region, and the second filler sequence may be located between the promoter region and exon region. In one embodiment, a viral genome may comprise two filler sequences, the first filler sequence may be located between the 5′ ITR and MCS region, and the second filler sequence may be located between the promoter region and 3′ ITR. In one embodiment, a viral genome may comprise two filler sequences, the first filler sequence may be located between the 5′ ITR and MCS region, and the second filler sequence may be located between the payload region and intron region. In one embodiment, a viral genome may comprise two filler sequences, the first filler sequence may be located between the 5′ ITR and MCS region, and the second filler sequence may be located between the payload region and enhancer region. In one embodiment, a viral genome may comprise two filler sequences, the first filler sequence may be located between the 5′ ITR and MCS region, and the second filler sequence may be located between the payload region and polyadenylation signal sequence region. In one embodiment, a viral genome may comprise two filler sequences, the first filler sequence may be located between the 5′ ITR and MCS region, and the second filler sequence may be located between the payload region and MCS region. In one embodiment, a viral genome may comprise two filler sequences, the first filler sequence may be located between the 5′ ITR and MCS region, and the second filler sequence may be located between the payload region and exon region. In one embodiment, a viral genome may comprise two filler sequences, the first filler sequence may be located between the 5′ ITR and MCS region, and the second filler sequence may be located between the payload region and 3′ ITR. In one embodiment, a viral genome may comprise two filler sequences, the first filler sequence may be located between the 5′ ITR and MCS region, and the second filler sequence may be located between the intron region and enhancer region. In one embodiment, a viral genome may comprise two filler sequences, the first filler sequence may be located between the 5′ ITR and MCS region, and the second filler sequence may be located between the intron region and polyadenylation signal sequence region. In one embodiment, a viral genome may comprise two filler sequences, the first filler sequence may be located between the 5′ ITR and MCS region, and the second filler sequence may be located between the intron region and MCS region. In one embodiment, a viral genome may comprise two filler sequences, the first filler sequence may be located between the 5′ ITR and MCS region, and the second filler sequence may be located between the intron region and exon region. In one embodiment, a viral genome may comprise two filler sequences, the first filler sequence may be located between the 5′ ITR and MCS region, and the second filler sequence may be located between the intron region and 3′ ITR. In one embodiment, a viral genome may comprise two filler sequences, the first filler sequence may be located between the 5′ ITR and MCS region, and the second filler sequence may be located between the enhancer region and polyadenylation signal sequence region. In one embodiment, a viral genome may comprise two filler sequences, the first filler sequence may be located between the 5′ ITR and MCS region, and the second filler sequence may be located between the enhancer region and MCS region. In one embodiment, a viral genome may comprise two filler sequences, the first filler sequence may be located between the 5′ ITR and MCS region, and the second filler sequence may be located between the enhancer region and exon region. In one embodiment, a viral genome may comprise two filler sequences, the first filler sequence may be located between the 5′ ITR and MCS region, and the second filler sequence may be located between the enhancer region and 3′ ITR. In one embodiment, a viral genome may comprise two filler sequences, the first filler sequence may be located between the 5′ ITR and MCS region, and the second filler sequence may be located between the polyadenylation signal sequence region and MCS region. In one embodiment, a viral genome may comprise two filler sequences, the first filler sequence may be located between the 5′ ITR and MCS region, and the second filler sequence may be located between the polyadenylation signal sequence region and exon region. In one embodiment, a viral genome may comprise two filler sequences, the first filler sequence may be located between the 5′ ITR and MCS region, and the second filler sequence may be located between the polyadenylation signal sequence region and 3′ ITR. In one embodiment, a viral genome may comprise two filler sequences, the first filler sequence may be located between the 5′ ITR and MCS region, and the second filler sequence may be located between the MCS region and exon region. In one embodiment, a viral genome may comprise two filler sequences, the first filler sequence may be located between the 5′ ITR and MCS region, and the second filler sequence may be located between the MCS region and 3′ ITR. In one embodiment, a viral genome may comprise two filler sequences, the first filler sequence may be located between the 5′ ITR and MCS region, and the second filler sequence may be located between the exon region and 3′ ITR.

[0252] In one embodiment, a viral genome may comprise two filler sequences, the first filler sequence may be located between the 5′ ITR and exon region, and the second filler sequence may be located between the promoter region and payload region. In one embodiment, a viral genome may comprise two filler sequences, the first filler sequence may be located between the 5′ ITR and exon region, and the second filler sequence may be located between the promoter region and intron region. In one embodiment, a viral genome may comprise two filler sequences, the first filler sequence may be located between the 5′ ITR and exon region, and the second filler sequence may be located between the promoter region and enhancer region. In one embodiment, a viral genome may comprise two filler sequences, the first filler sequence may be located between the 5′ ITR and exon region, and the second filler sequence may be located between the promoter region and polyadenylation signal sequence region. In one embodiment, a viral genome may comprise two filler sequences, the first filler sequence may be located between the 5′ ITR and exon region, and the second filler sequence may be located between the promoter region and MCS region. In one embodiment, a viral genome may comprise two filler sequences, the first filler sequence may be located between the 5′ ITR and exon region, and the second filler sequence may be located between the promoter region and exon region. In one embodiment, a viral genome may comprise two filler sequences, the first filler sequence may be located between the 5′ ITR and exon region, and the second filler sequence may be located between the promoter region and 3′ ITR. In one embodiment, a viral genome may comprise two filler sequences, the first filler sequence may be located between the 5′ ITR and exon region, and the second filler sequence may be located between the payload region and intron region. In one embodiment, a viral genome may comprise two filler sequences, the first filler sequence may be located between the 5′ ITR and exon region, and the second filler sequence may be located between the payload region and enhancer region. In one embodiment, a viral genome may comprise two filler sequences, the first filler sequence may be located between the 5′ ITR and exon region, and the second filler sequence may be located between the payload region and polyadenylation signal sequence region. In one embodiment, a viral genome may comprise two filler sequences, the first filler sequence may be located between the 5′ ITR and exon region, and the second filler sequence may be located between the payload region and MCS region. In one embodiment, a viral genome may comprise two filler sequences, the first filler sequence may be located between the 5′ ITR and exon region, and the second filler sequence may be located between the payload region and exon region. In one embodiment, a viral genome may comprise two filler sequences, the first filler sequence may be located between the 5′ ITR and exon region, and the second filler sequence may be located between the payload region and 3′ ITR. In one embodiment, a viral genome may comprise two filler sequences, the first filler sequence may be located between the 5′ ITR and exon region, and the second filler sequence may be located between the intron region and enhancer region. In one embodiment, a viral genome may comprise two filler sequences, the first filler sequence may be located between the 5′ ITR and exon region, and the second filler sequence may be located between the intron region and polyadenylation signal sequence region. In one embodiment, a viral genome may comprise two filler sequences, the first filler sequence may be located between the 5′ ITR and exon region, and the second filler sequence may be located between the intron region and MCS region. In one embodiment, a viral genome may comprise two filler sequences, the first filler sequence may be located between the 5′ ITR and exon region, and the second filler sequence may be located between the intron region and exon region. In one embodiment, a viral genome may comprise two filler sequences, the first filler sequence may be located between the 5′ ITR and exon region, and the second filler sequence may be located between the intron region and 3′ ITR. In one embodiment, a viral genome may comprise two filler sequences, the first filler sequence may be located between the 5′ ITR and exon region, and the second filler sequence may be located between the enhancer region and polyadenylation signal sequence region. In one embodiment, a viral genome may comprise two filler sequences, the first filler sequence may be located between the 5′ ITR and exon region, and the second filler sequence may be located between the enhancer region and MCS region. In one embodiment, a viral genome may comprise two filler sequences, the first filler sequence may be located between the 5′ ITR and exon region, and the second filler sequence may be located between the enhancer region and exon region. In one embodiment, a viral genome may comprise two filler sequences, the first filler sequence may be located between the 5′ ITR and exon region, and the second filler sequence may be located between the enhancer region and 3′ ITR. In one embodiment, a viral genome may comprise two filler sequences, the first filler sequence may be located between the 5′ ITR and exon region, and the second filler sequence may be located between the polyadenylation signal sequence region and MCS region. In one embodiment, a viral genome may comprise two filler sequences, the first filler sequence may be located between the 5′ ITR and exon region, and the second filler sequence may be located between the polyadenylation signal sequence region and exon region. In one embodiment, a viral genome may comprise two filler sequences, the first filler sequence may be located between the 5′ ITR and exon region, and the second filler sequence may be located between the polyadenylation signal sequence region and 3′ ITR. In one embodiment, a viral genome may comprise two filler sequences, the first filler sequence may be located between the 5′ ITR and exon region, and the second filler sequence may be located between the MCS region and exon region. In one embodiment, a viral genome may comprise two filler sequences, the first filler sequence may be located between the 5′ ITR and exon region, and the second filler sequence may be located between the MCS region and 3′ ITR. In one embodiment, a viral genome may comprise two filler sequences, the first filler sequence may be located between the 5′ ITR and exon region, and the second filler sequence may be located between the exon region and 3′ ITR.

[0253] In one embodiment, a viral genome may comprise two filler sequences, the first filler sequence may be located between the promoter region and payload region, and the second filler sequence may be located between the payload region and intron region. In one embodiment, a viral genome may comprise two filler sequences, the first filler sequence may be located between the promoter region and payload region, and the second filler sequence may be located between the payload region and enhancer region. In one embodiment, a viral genome may comprise two filler sequences, the first filler sequence may be located between the promoter region and payload region, and the second filler sequence may be located between the payload region and polyadenylation signal sequence region. In one embodiment, a viral genome may comprise two filler sequences, the first filler sequence may be located between the promoter region and payload region, and the second filler sequence may be located between the payload region and MCS region. In one embodiment, a viral genome may comprise two filler sequences, the first filler sequence may be located between the promoter region and payload region, and the second filler sequence may be located between the payload region and exon region. In one embodiment, a viral genome may comprise two filler sequences, the first filler sequence may be located between the promoter region and payload region, and the second filler sequence may be located between the payload region and 3′ ITR. In one embodiment, a viral genome may comprise two filler sequences, the first filler sequence may be located between the promoter region and payload region, and the second filler sequence may be located between the intron region and enhancer region. In one embodiment, a viral genome may comprise two filler sequences, the first filler sequence may be located between the promoter region and payload region, and the second filler sequence may be located between the intron region and polyadenylation signal sequence region. In one embodiment, a viral genome may comprise two filler sequences, the first filler sequence may be located between the promoter region and payload region, and the second filler sequence may be located between the intron region and MCS region. In one embodiment, a viral genome may comprise two filler sequences, the first filler sequence may be located between the promoter region and payload region, and the second filler sequence may be located between the intron region and exon region. In one embodiment, a viral genome may comprise two filler sequences, the first filler sequence may be located between the promoter region and payload region, and the second filler sequence may be located between the intron region and 3′ ITR. In one embodiment, a viral genome may comprise two filler sequences, the first filler sequence may be located between the promoter region and payload region, and the second filler sequence may be located between the enhancer region and polyadenylation signal sequence region. In one embodiment, a viral genome may comprise two filler sequences, the first filler sequence may be located between the promoter region and payload region, and the second filler sequence may be located between the enhancer region and MCS region. In one embodiment, a viral genome may comprise two filler sequences, the first filler sequence may be located between the promoter region and payload region, and the second filler sequence may be located between the enhancer region and exon region. In one embodiment, a viral genome may comprise two filler sequences, the first filler sequence may be located between the promoter region and payload region, and the second filler sequence may be located between the enhancer region and 3′ ITR. In one embodiment, a viral genome may comprise two filler sequences, the first filler sequence may be located between the promoter region and payload region, and the second filler sequence may be located between the polyadenylation signal sequence region and MCS region. In one embodiment, a viral genome may comprise two filler sequences, the first filler sequence may be located between the promoter region and payload region, and the second filler sequence may be located between the polyadenylation signal sequence region and exon region. In one embodiment, a viral genome may comprise two filler sequences, the first filler sequence may be located between the promoter region and payload region, and the second filler sequence may be located between the polyadenylation signal sequence region and 3′ ITR. In one embodiment, a viral genome may comprise two filler sequences, the first filler sequence may be located between the promoter region and payload region, and the second filler sequence may be located between the MCS region and exon region. In one embodiment, a viral genome may comprise two filler sequences, the first filler sequence may be located between the promoter region and payload region, and the second filler sequence may be located between the MCS region and 3′ ITR. In one embodiment, a viral genome may comprise two filler sequences, the first filler sequence may be located between the promoter region and payload region, and the second filler sequence may be located between the exon region and 3′ ITR.

[0254] In one embodiment, a viral genome may comprise two filler sequences, the first filler sequence may be located between the promoter region and intron region, and the second filler sequence may be located between the payload region and intron region. In one embodiment, a viral genome may comprise two filler sequences, the first filler sequence may be located between the promoter region and intron region, and the second filler sequence may be located between the payload region and enhancer region. In one embodiment, a viral genome may comprise two filler sequences, the first filler sequence may be located between the promoter region and intron region, and the second filler sequence may be located between the payload region and polyadenylation signal sequence region. In one embodiment, a viral genome may comprise two filler sequences, the first filler sequence may be located between the promoter region and intron region, and the second filler sequence may be located between the payload region and MCS region. In one embodiment, a viral genome may comprise two filler sequences, the first filler sequence may be located between the promoter region and intron region, and the second filler sequence may be located between the payload region and exon region. In one embodiment, a viral genome may comprise two filler sequences, the first filler sequence may be located between the promoter region and intron region, and the second filler sequence may be located between the payload region and 3′ ITR. In one embodiment, a viral genome may comprise two filler sequences, the first filler sequence may be located between the promoter region and intron region, and the second filler sequence may be located between the intron region and enhancer region. In one embodiment, a viral genome may comprise two filler sequences, the first filler sequence may be located between the promoter region and intron region, and the second filler sequence may be located between the intron region and polyadenylation signal sequence region. In one embodiment, a viral genome may comprise two filler sequences, the first filler sequence may be located between the promoter region and intron region, and the second filler sequence may be located between the intron region and MCS region. In one embodiment, a viral genome may comprise two filler sequences, the first filler sequence may be located between the promoter region and intron region, and the second filler sequence may be located between the intron region and exon region. In one embodiment, a viral genome may comprise two filler sequences, the first filler sequence may be located between the promoter region and intron region, and the second filler sequence may be located between the intron region and 3′ ITR. In one embodiment, a viral genome may comprise two filler sequences, the first filler sequence may be located between the promoter region and intron region, and the second filler sequence may be located between the enhancer region and polyadenylation signal sequence region. In one embodiment, a viral genome may comprise two filler sequences, the first filler sequence may be located between the promoter region and intron region, and the second filler sequence may be located between the enhancer region and MCS region. In one embodiment, a viral genome may comprise two filler sequences, the first filler sequence may be located between the promoter region and intron region, and the second filler sequence may be located between the enhancer region and exon region. In one embodiment, a viral genome may comprise two filler sequences, the first filler sequence may be located between the promoter region and intron region, and the second filler sequence may be located between the enhancer region and 3′ ITR. In one embodiment, a viral genome may comprise two filler sequences, the first filler sequence may be located between the promoter region and intron region, and the second filler sequence may be located between the polyadenylation signal sequence region and MCS region. In one embodiment, a viral genome may comprise two filler sequences, the first filler sequence may be located between the promoter region and intron region, and the second filler sequence may be located between the polyadenylation signal sequence region and exon region. In one embodiment, a viral genome may comprise two filler sequences, the first filler sequence may be located between the promoter region and intron region, and the second filler sequence may be located between the polyadenylation signal sequence region and 3′ ITR. In one embodiment, a viral genome may comprise two filler sequences, the first filler sequence may be located between the promoter region and intron region, and the second filler sequence may be located between the MCS region and exon region. In one embodiment, a viral genome may comprise two filler sequences, the first filler sequence may be located between the promoter region and intron region, and the second filler sequence may be located between the MCS region and 3′ ITR. In one embodiment, a viral genome may comprise two filler sequences, the first filler sequence may be located between the promoter region and intron region, and the second filler sequence may be located between the exon region and 3′ ITR.

[0255] In one embodiment, a viral genome may comprise two filler sequences, the first filler sequence may be located between the promoter region and enhancer region, and the second filler sequence may be located between the payload region and intron region. In one embodiment, a viral genome may comprise two filler sequences, the first filler sequence may be located between the promoter region and enhancer region, and the second filler sequence may be located between the payload region and enhancer region. In one embodiment, a viral genome may comprise two filler sequences, the first filler sequence may be located between the promoter region and enhancer region, and the second filler sequence may be located between the payload region and polyadenylation signal sequence region. In one embodiment, a viral genome may comprise two filler sequences, the first filler sequence may be located between the promoter region and enhancer region, and the second filler sequence may be located between the payload region and MCS region. In one embodiment, a viral genome may comprise two filler sequences, the first filler sequence may be located between the promoter region and enhancer region, and the second filler sequence may be located between the payload region and exon region. In one embodiment, a viral genome may comprise two filler sequences, the first filler sequence may be located between the promoter region and enhancer region, and the second filler sequence may be located between the payload region and 3′ ITR. In one embodiment, a viral genome may comprise two filler sequences, the first filler sequence may be located between the promoter region and enhancer region, and the second filler sequence may be located between the intron region and enhancer region. In one embodiment, a viral genome may comprise two filler sequences, the first filler sequence may be located between the promoter region and enhancer region, and the second filler sequence may be located between the intron region and polyadenylation signal sequence region. In one embodiment, a viral genome may comprise two filler sequences, the first filler sequence may be located between the promoter region and enhancer region, and the second filler sequence may be located between the intron region and MCS region. In one embodiment, a viral genome may comprise two filler sequences, the first filler sequence may be located between the promoter region and enhancer region, and the second filler sequence may be located between the intron region and exon region. In one embodiment, a viral genome may comprise two filler sequences, the first filler sequence may be located between the promoter region and enhancer region, and the second filler sequence may be located between the intron region and 3′ ITR. In one embodiment, a viral genome may comprise two filler sequences, the first filler sequence may be located between the promoter region and enhancer region, and the second filler sequence may be located between the enhancer region and polyadenylation signal sequence region. In one embodiment, a viral genome may comprise two filler sequences, the first filler sequence may be located between the promoter region and enhancer region, and the second filler sequence may be located between the enhancer region and MCS region. In one embodiment, a viral genome may comprise two filler sequences, the first filler sequence may be located between the promoter region and enhancer region, and the second filler sequence may be located between the enhancer region and exon region. In one embodiment, a viral genome may comprise two filler sequences, the first filler sequence may be located between the promoter region and enhancer region, and the second filler sequence may be located between the enhancer region and 3′ ITR. In one embodiment, a viral genome may comprise two filler sequences, the first filler sequence may be located between the promoter region and enhancer region, and the second filler sequence may be located between the polyadenylation signal sequence region and MCS region. In one embodiment, a viral genome may comprise two filler sequences, the first filler sequence may be located between the promoter region and enhancer region, and the second filler sequence may be located between the polyadenylation signal sequence region and exon region. In one embodiment, a viral genome may comprise two filler sequences, the first filler sequence may be located between the promoter region and enhancer region, and the second filler sequence may be located between the polyadenylation signal sequence region and 3′ ITR. In one embodiment, a viral genome may comprise two filler sequences, the first filler sequence may be located between the promoter region and enhancer region, and the second filler sequence may be located between the MCS region and exon region. In one embodiment, a viral genome may comprise two filler sequences, the first filler sequence may be located between the promoter region and enhancer region, and the second filler sequence may be located between the MCS region and 3′ ITR. In one embodiment, a viral genome may comprise two filler sequences, the first filler sequence may be located between the promoter region and enhancer region, and the second filler sequence may be located between the exon region and 3′ ITR.

[0256] In one embodiment, a viral genome may comprise two filler sequences, the first filler sequence may be located between the promoter region and polyadenylation signal sequence region, and the second filler sequence may be located between the payload region and intron region. In one embodiment, a viral genome may comprise two filler sequences, the first filler sequence may be located between the promoter region and polyadenylation signal sequence region, and the second filler sequence may be located between the payload region and enhancer region. In one embodiment, a viral genome may comprise two filler sequences, the first filler sequence may be located between the promoter region and polyadenylation signal sequence region, and the second filler sequence may be located between the payload region and polyadenylation signal sequence region. In one embodiment, a viral genome may comprise two filler sequences, the first filler sequence may be located between the promoter region and polyadenylation signal sequence region, and the second filler sequence may be located between the payload region and MCS region. In one embodiment, a viral genome may comprise two filler sequences, the first filler sequence may be located between the promoter region and polyadenylation signal sequence region, and the second filler sequence may be located between the payload region and exon region. In one embodiment, a viral genome may comprise two filler sequences, the first filler sequence may be located between the promoter region and polyadenylation signal sequence region, and the second filler sequence may be located between the payload region and 3′ ITR. In one embodiment, a viral genome may comprise two filler sequences, the first filler sequence may be located between the promoter region and polyadenylation signal sequence region, and the second filler sequence may be located between the intron region and enhancer region. In one embodiment, a viral genome may comprise two filler sequences, the first filler sequence may be located between the promoter region and polyadenylation signal sequence region, and the second filler sequence may be located between the intron region and polyadenylation signal sequence region. In one embodiment, a viral genome may comprise two filler sequences, the first filler sequence may be located between the promoter region and polyadenylation signal sequence region, and the second filler sequence may be located between the intron region and MCS region. In one embodiment, a viral genome may comprise two filler sequences, the first filler sequence may be located between the promoter region and polyadenylation signal sequence region, and the second filler sequence may be located between the intron region and exon region. In one embodiment, a viral genome may comprise two filler sequences, the first filler sequence may be located between the promoter region and polyadenylation signal sequence region, and the second filler sequence may be located between the intron region and 3′ ITR. In one embodiment, a viral genome may comprise two filler sequences, the first filler sequence may be located between the promoter region and polyadenylation signal sequence region, and the second filler sequence may be located between the enhancer region and polyadenylation signal sequence region. In one embodiment, a viral genome may comprise two filler sequences, the first filler sequence may be located between the promoter region and polyadenylation signal sequence region, and the second filler sequence may be located between the enhancer region and MCS region. In one embodiment, a viral genome may comprise two filler sequences, the first filler sequence may be located between the promoter region and polyadenylation signal sequence region, and the second filler sequence may be located between the enhancer region and exon region. In one embodiment, a viral genome may comprise two filler sequences, the first filler sequence may be located between the promoter region and polyadenylation signal sequence region, and the second filler sequence may be located between the enhancer region and 3′ ITR. In one embodiment, a viral genome may comprise two filler sequences, the first filler sequence may be located between the promoter region and polyadenylation signal sequence region, and the second filler sequence may be located between the polyadenylation signal sequence region and MCS region. In one embodiment, a viral genome may comprise two filler sequences, the first filler sequence may be located between the promoter region and polyadenylation signal sequence region, and the second filler sequence may be located between the polyadenylation signal sequence region and exon region. In one embodiment, a viral genome may comprise two filler sequences, the first filler sequence may be located between the promoter region and polyadenylation signal sequence region, and the second filler sequence may be located between the polyadenylation signal sequence region and 3′ ITR. In one embodiment, a viral genome may comprise two filler sequences, the first filler sequence may be located between the promoter region and polyadenylation signal sequence region, and the second filler sequence may be located between the MCS region and exon region. In one embodiment, a viral genome may comprise two filler sequences, the first filler sequence may be located between the promoter region and polyadenylation signal sequence region, and the second filler sequence may be located between the MCS region and 3′ ITR. In one embodiment, a viral genome may comprise two filler sequences, the first filler sequence may be located between the promoter region and polyadenylation signal sequence region, and the second filler sequence may be located between the exon region and 3′ ITR.

[0257] In one embodiment, a viral genome may comprise two filler sequences, the first filler sequence may be located between the promoter region and exon region, and the second filler sequence may be located between the payload region and intron region. In one embodiment, a viral genome may comprise two filler sequences, the first filler sequence may be located between the promoter region and exon region, and the second filler sequence may be located between the payload region and enhancer region. In one embodiment, a viral genome may comprise two filler sequences, the first filler sequence may be located between the promoter region and exon region, and the second filler sequence may be located between the payload region and polyadenylation signal sequence region. In one embodiment, a viral genome may comprise two filler sequences, the first filler sequence may be located between the promoter region and exon region, and the second filler sequence may be located between the payload region and MCS region. In one embodiment, a viral genome may comprise two filler sequences, the first filler sequence may be located between the promoter region and exon region, and the second filler sequence may be located between the payload region and exon region. In one embodiment, a viral genome may comprise two filler sequences, the first filler sequence may be located between the promoter region and exon region, and the second filler sequence may be located between the payload region and 3′ ITR. In one embodiment, a viral genome may comprise two filler sequences, the first filler sequence may be located between the promoter region and exon region, and the second filler sequence may be located between the intron region and enhancer region. In one embodiment, a viral genome may comprise two filler sequences, the first filler sequence may be located between the promoter region and exon region, and the second filler sequence may be located between the intron region and polyadenylation signal sequence region. In one embodiment, a viral genome may comprise two filler sequences, the first filler sequence may be located between the promoter region and exon region, and the second filler sequence may be located between the intron region and MCS region. In one embodiment, a viral genome may comprise two filler sequences, the first filler sequence may be located between the promoter region and exon region, and the second filler sequence may be located between the intron region and exon region. In one embodiment, a viral genome may comprise two filler sequences, the first filler sequence may be located between the promoter region and exon region, and the second filler sequence may be located between the intron region and 3′ ITR. In one embodiment, a viral genome may comprise two filler sequences, the first filler sequence may be located between the promoter region and exon region, and the second filler sequence may be located between the enhancer region and polyadenylation signal sequence region. In one embodiment, a viral genome may comprise two filler sequences, the first filler sequence may be located between the promoter region and exon region, and the second filler sequence may be located between the enhancer region and MCS region. In one embodiment, a viral genome may comprise two filler sequences, the first filler sequence may be located between the promoter region and exon region, and the second filler sequence may be located between the enhancer region and exon region. In one embodiment, a viral genome may comprise two filler sequences, the first filler sequence may be located between the promoter region and exon region, and the second filler sequence may be located between the enhancer region and 3′ ITR. In one embodiment, a viral genome may comprise two filler sequences, the first filler sequence may be located between the promoter region and exon region, and the second filler sequence may be located between the polyadenylation signal sequence region and MCS region. In one embodiment, a viral genome may comprise two filler sequences, the first filler sequence may be located between the promoter region and exon region, and the second filler sequence may be located between the polyadenylation signal sequence region and exon region. In one embodiment, a viral genome may comprise two filler sequences, the first filler sequence may be located between the promoter region and exon region, and the second filler sequence may be located between the polyadenylation signal sequence region and 3′ ITR. In one embodiment, a viral genome may comprise two filler sequences, the first filler sequence may be located between the promoter region and exon region, and the second filler sequence may be located between the MCS region and exon region. In one embodiment, a viral genome may comprise two filler sequences, the first filler sequence may be located between the promoter region and exon region, and the second filler sequence may be located between the MCS region and 3′ ITR. In one embodiment, a viral genome may comprise two filler sequences, the first filler sequence may be located between the promoter region and exon region, and the second filler sequence may be located between the exon region and 3′ ITR.

[0258] In one embodiment, a viral genome may comprise two filler sequences, the first filler sequence may be located between the promoter region and MCS region, and the second filler sequence may be located between the payload region and intron region. In one embodiment, a viral genome may comprise two filler sequences, the first filler sequence may be located between the promoter region and MCS region, and the second filler sequence may be located between the payload region and enhancer region. In one embodiment, a viral genome may comprise two filler sequences, the first filler sequence may be located between the promoter region and MCS region, and the second filler sequence may be located between the payload region and polyadenylation signal sequence region. In one embodiment, a viral genome may comprise two filler sequences, the first filler sequence may be located between the promoter region and MCS region, and the second filler sequence may be located between the payload region and MCS region. In one embodiment, a viral genome may comprise two filler sequences, the first filler sequence may be located between the promoter region and MCS region, and the second filler sequence may be located between the payload region and exon region. In one embodiment, a viral genome may comprise two filler sequences, the first filler sequence may be located between the promoter region and MCS region, and the second filler sequence may be located between the payload region and 3′ ITR. In one embodiment, a viral genome may comprise two filler sequences, the first filler sequence may be located between the promoter region and MCS region, and the second filler sequence may be located between the intron region and enhancer region. In one embodiment, a viral genome may comprise two filler sequences, the first filler sequence may be located between the promoter region and MCS region, and the second filler sequence may be located between the intron region and polyadenylation signal sequence region. In one embodiment, a viral genome may comprise two filler sequences, the first filler sequence may be located between the promoter region and MCS region, and the second filler sequence may be located between the intron region and MCS region. In one embodiment, a viral genome may comprise two filler sequences, the first filler sequence may be located between the promoter region and MCS region, and the second filler sequence may be located between the intron region and exon region. In one embodiment, a viral genome may comprise two filler sequences, the first filler sequence may be located between the promoter region and MCS region, and the second filler sequence may be located between the intron region and 3′ ITR. In one embodiment, a viral genome may comprise two filler sequences, the first filler sequence may be located between the promoter region and MCS region, and the second filler sequence may be located between the enhancer region and polyadenylation signal sequence region. In one embodiment, a viral genome may comprise two filler sequences, the first filler sequence may be located between the promoter region and MCS region, and the second filler sequence may be located between the enhancer region and MCS region. In one embodiment, a viral genome may comprise two filler sequences, the first filler sequence may be located between the promoter region and MCS region, and the second filler sequence may be located between the enhancer region and exon region. In one embodiment, a viral genome may comprise two filler sequences, the first filler sequence may be located between the promoter region and MCS region, and the second filler sequence may be located between the enhancer region and 3′ ITR. In one embodiment, a viral genome may comprise two filler sequences, the first filler sequence may be located between the promoter region and MCS region, and the second filler sequence may be located between the polyadenylation signal sequence region and MCS region. In one embodiment, a viral genome may comprise two filler sequences, the first filler sequence may be located between the promoter region and MCS region, and the second filler sequence may be located between the polyadenylation signal sequence region and exon region. In one embodiment, a viral genome may comprise two filler sequences, the first filler sequence may be located between the promoter region and MCS region, and the second filler sequence may be located between the polyadenylation signal sequence region and 3′ ITR. In one embodiment, a viral genome may comprise two filler sequences, the first filler sequence may be located between the promoter region and MCS region, and the second filler sequence may be located between the MCS region and exon region. In one embodiment, a viral genome may comprise two filler sequences, the first filler sequence may be located between the promoter region and MCS region, and the second filler sequence may be located between the MCS region and 3′ ITR. In one embodiment, a viral genome may comprise two filler sequences, the first filler sequence may be located between the promoter region and MCS region, and the second filler sequence may be located between the exon region and 3′ ITR.

[0259] In one embodiment, a viral genome may comprise two filler sequences, the first filler sequence may be located between the promoter region and 3′ITR, and the second filler sequence may be located between the payload region and intron region. In one embodiment, a viral genome may comprise two filler sequences, the first filler sequence may be located between the promoter region and 3′ITR, and the second filler sequence may be located between the payload region and enhancer region. In one embodiment, a viral genome may comprise two filler sequences, the first filler sequence may be located between the promoter region and 3′ITR, and the second filler sequence may be located between the payload region and polyadenylation signal sequence region. In one embodiment, a viral genome may comprise two filler sequences, the first filler sequence may be located between the promoter region and 3′ITR, and the second filler sequence may be located between the payload region and MCS region. In one embodiment, a viral genome may comprise two filler sequences, the first filler sequence may be located between the promoter region and 3′ITR, and the second filler sequence may be located between the payload region and exon region. In one embodiment, a viral genome may comprise two filler sequences, the first filler sequence may be located between the promoter region and 3′ITR, and the second filler sequence may be located between the payload region and 3′ ITR. In one embodiment, a viral genome may comprise two filler sequences, the first filler sequence may be located between the promoter region and 3′ITR, and the second filler sequence may be located between the intron region and enhancer region. In one embodiment, a viral genome may comprise two filler sequences, the first filler sequence may be located between the promoter region and 3′ITR, and the second filler sequence may be located between the intron region and polyadenylation signal sequence region. In one embodiment, a viral genome may comprise two filler sequences, the first filler sequence may be located between the promoter region and 3′ITR, and the second filler sequence may be located between the intron region and MCS region. In one embodiment, a viral genome may comprise two filler sequences, the first filler sequence may be located between the promoter region and 3′ITR, and the second filler sequence may be located between the intron region and exon region. In one embodiment, a viral genome may comprise two filler sequences, the first filler sequence may be located between the promoter region and 3′ITR, and the second filler sequence may be located between the intron region and 3′ ITR. In one embodiment, a viral genome may comprise two filler sequences, the first filler sequence may be located between the promoter region and 3′ITR, and the second filler sequence may be located between the enhancer region and polyadenylation signal sequence region. In one embodiment, a viral genome may comprise two filler sequences, the first filler sequence may be located between the promoter region and 3′ITR, and the second filler sequence may be located between the enhancer region and MCS region. In one embodiment, a viral genome may comprise two filler sequences, the first filler sequence may be located between the promoter region and 3′ITR, and the second filler sequence may be located between the enhancer region and exon region. In one embodiment, a viral genome may comprise two filler sequences, the first filler sequence may be located between the promoter region and 3′ITR, and the second filler sequence may be located between the enhancer region and 3′ ITR. In one embodiment, a viral genome may comprise two filler sequences, the first filler sequence may be located between the promoter region and 3′ITR, and the second filler sequence may be located between the polyadenylation signal sequence region and MCS region. In one embodiment, a viral genome may comprise two filler sequences, the first filler sequence may be located between the promoter region and 3′ITR, and the second filler sequence may be located between the polyadenylation signal sequence region and exon region. In one embodiment, a viral genome may comprise two filler sequences, the first filler sequence may be located between the promoter region and 3′ITR, and the second filler sequence may be located between the polyadenylation signal sequence region and 3′ ITR. In one embodiment, a viral genome may comprise two filler sequences, the first filler sequence may be located between the promoter region and 3′ITR, and the second filler sequence may be located between the MCS region and exon region. In one embodiment, a viral genome may comprise two filler sequences, the first filler sequence may be located between the promoter region and 3′ITR, and the second filler sequence may be located between the MCS region and 3′ ITR. In one embodiment, a viral genome may comprise two filler sequences, the first filler sequence may be located between the promoter region and 3′ITR, and the second filler sequence may be located between the exon region and 3′ ITR.

[0260] In one embodiment, a viral genome may comprise two filler sequences, the first filler sequence may be located between the payload region and intron region, and the second filler sequence may be located between the intron region and enhancer region. In one embodiment, a viral genome may comprise two filler sequences, the first filler sequence may be located between the payload region and intron region, and the second filler sequence may be located between the intron region and polyadenylation signal sequence region. In one embodiment, a viral genome may comprise two filler sequences, the first filler sequence may be located between the payload region and intron region, and the second filler sequence may be located between the intron region and MCS region. In one embodiment, a viral genome may comprise two filler sequences, the first filler sequence may be located between the payload region and intron region, and the second filler sequence may be located between the intron region and exon region. In one embodiment, a viral genome may comprise two filler sequences, the first filler sequence may be located between the payload region and intron region, and the second filler sequence may be located between the intron region and 3′ ITR. In one embodiment, a viral genome may comprise two filler sequences, the first filler sequence may be located between the payload region and intron region, and the second filler sequence may be located between the enhancer region and polyadenylation signal sequence region. In one embodiment, a viral genome may comprise two filler sequences, the first filler sequence may be located between the payload region and intron region, and the second filler sequence may be located between the enhancer region and MCS region. In one embodiment, a viral genome may comprise two filler sequences, the first filler sequence may be located between the payload region and intron region, and the second filler sequence may be located between the enhancer region and exon region. In one embodiment, a viral genome may comprise two filler sequences, the first filler sequence may be located between the payload region and intron region, and the second filler sequence may be located between the enhancer region and 3′ ITR. In one embodiment, a viral genome may comprise two filler sequences, the first filler sequence may be located between the payload region and intron region, and the second filler sequence may be located between the polyadenylation signal sequence region and MCS region. In one embodiment, a viral genome may comprise two filler sequences, the first filler sequence may be located between the payload region and intron region, and the second filler sequence may be located between the polyadenylation signal sequence region and exon region. In one embodiment, a viral genome may comprise two filler sequences, the first filler sequence may be located between the payload region and intron region, and the second filler sequence may be located between the polyadenylation signal sequence region and 3′ ITR. In one embodiment, a viral genome may comprise two filler sequences, the first filler sequence may be located between the payload region and intron region, and the second filler sequence may be located between the MCS region and exon region. In one embodiment, a viral genome may comprise two filler sequences, the first filler sequence may be located between the payload region and intron region, and the second filler sequence may be located between the MCS region and 3′ ITR. In one embodiment, a viral genome may comprise two filler sequences, the first filler sequence may be located between the payload region and intron region, and the second filler sequence may be located between the exon region and 3′ ITR.

[0261] In one embodiment, a viral genome may comprise two filler sequences, the first filler sequence may be located between the payload region and enhancer region, and the second filler sequence may be located between the intron region and enhancer region. In one embodiment, a viral genome may comprise two filler sequences, the first filler sequence may be located between the payload region and enhancer region, and the second filler sequence may be located between the intron region and polyadenylation signal sequence region. In one embodiment, a viral genome may comprise two filler sequences, the first filler sequence may be located between the payload region and enhancer region, and the second filler sequence may be located between the intron region and MCS region. In one embodiment, a viral genome may comprise two filler sequences, the first filler sequence may be located between the payload region and enhancer region, and the second filler sequence may be located between the intron region and exon region. In one embodiment, a viral genome may comprise two filler sequences, the first filler sequence may be located between the payload region and enhancer region, and the second filler sequence may be located between the intron region and 3′ ITR. In one embodiment, a viral genome may comprise two filler sequences, the first filler sequence may be located between the payload region and enhancer region, and the second filler sequence may be located between the enhancer region and polyadenylation signal sequence region. In one embodiment, a viral genome may comprise two filler sequences, the first filler sequence may be located between the payload region and enhancer region, and the second filler sequence may be located between the enhancer region and MCS region. In one embodiment, a viral genome may comprise two filler sequences, the first filler sequence may be located between the payload region and enhancer region, and the second filler sequence may be located between the enhancer region and exon region. In one embodiment, a viral genome may comprise two filler sequences, the first filler sequence may be located between the payload region and enhancer region, and the second filler sequence may be located between the enhancer region and 3′ ITR. In one embodiment, a viral genome may comprise two filler sequences, the first filler sequence may be located between the payload region and enhancer region, and the second filler sequence may be located between the polyadenylation signal sequence region and MCS region. In one embodiment, a viral genome may comprise two filler sequences, the first filler sequence may be located between the payload region and enhancer region, and the second filler sequence may be located between the polyadenylation signal sequence region and exon region. In one embodiment, a viral genome may comprise two filler sequences, the first filler sequence may be located between the payload region and enhancer region, and the second filler sequence may be located between the polyadenylation signal sequence region and 3′ ITR. In one embodiment, a viral genome may comprise two filler sequences, the first filler sequence may be located between the payload region and enhancer region, and the second filler sequence may be located between the MCS region and exon region. In one embodiment, a viral genome may comprise two filler sequences, the first filler sequence may be located between the payload region and enhancer region, and the second filler sequence may be located between the MCS region and 3′ ITR. In one embodiment, a viral genome may comprise two filler sequences, the first filler sequence may be located between the payload region and enhancer region, and the second filler sequence may be located between the exon region and 3′ ITR.

[0262] In one embodiment, a viral genome may comprise two filler sequences, the first filler sequence may be located between the payload region and polyadenylation signal sequence region, and the second filler sequence may be located between the intron region and enhancer region. In one embodiment, a viral genome may comprise two filler sequences, the first filler sequence may be located between the payload region and polyadenylation signal sequence region, and the second filler sequence may be located between the intron region and polyadenylation signal sequence region. In one embodiment, a viral genome may comprise two filler sequences, the first filler sequence may be located between the payload region and polyadenylation signal sequence region, and the second filler sequence may be located between the intron region and MCS region. In one embodiment, a viral genome may comprise two filler sequences, the first filler sequence may be located between the payload region and polyadenylation signal sequence region, and the second filler sequence may be located between the intron region and exon region. In one embodiment, a viral genome may comprise two filler sequences, the first filler sequence may be located between the payload region and polyadenylation signal sequence region, and the second filler sequence may be located between the intron region and 3′ ITR. In one embodiment, a viral genome may comprise two filler sequences, the first filler sequence may be located between the payload region and polyadenylation signal sequence region, and the second filler sequence may be located between the enhancer region and polyadenylation signal sequence region. In one embodiment, a viral genome may comprise two filler sequences, the first filler sequence may be located between the payload region and polyadenylation signal sequence region, and the second filler sequence may be located between the enhancer region and MCS region. In one embodiment, a viral genome may comprise two filler sequences, the first filler sequence may be located between the payload region and polyadenylation signal sequence region, and the second filler sequence may be located between the enhancer region and exon region. In one embodiment, a viral genome may comprise two filler sequences, the first filler sequence may be located between the payload region and polyadenylation signal sequence region, and the second filler sequence may be located between the enhancer region and 3′ ITR. In one embodiment, a viral genome may comprise two filler sequences, the first filler sequence may be located between the payload region and polyadenylation signal sequence region, and the second filler sequence may be located between the polyadenylation signal sequence region and MCS region. In one embodiment, a viral genome may comprise two filler sequences, the first filler sequence may be located between the payload region and polyadenylation signal sequence region, and the second filler sequence may be located between the polyadenylation signal sequence region and exon region. In one embodiment, a viral genome may comprise two filler sequences, the first filler sequence may be located between the payload region and polyadenylation signal sequence region, and the second filler sequence may be located between the polyadenylation signal sequence region and 3′ ITR. In one embodiment, a viral genome may comprise two filler sequences, the first filler sequence may be located between the payload region and polyadenylation signal sequence region, and the second filler sequence may be located between the MCS region and exon region. In one embodiment, a viral genome may comprise two filler sequences, the first filler sequence may be located between the payload region and polyadenylation signal sequence region, and the second filler sequence may be located between the MCS region and 3′ ITR. In one embodiment, a viral genome may comprise two filler sequences, the first filler sequence may be located between the payload region and polyadenylation signal sequence region, and the second filler sequence may be located between the exon region and 3′ ITR.

[0263] In one embodiment, a viral genome may comprise two filler sequences, the first filler sequence may be located between the payload region and MCS region, and the second filler sequence may be located between the intron region and enhancer region. In one embodiment, a viral genome may comprise two filler sequences, the first filler sequence may be located between the payload region and MCS region, and the second filler sequence may be located between the intron region and polyadenylation signal sequence region. In one embodiment, a viral genome may comprise two filler sequences, the first filler sequence may be located between the payload region and MCS region, and the second filler sequence may be located between the intron region and MCS region. In one embodiment, a viral genome may comprise two filler sequences, the first filler sequence may be located between the payload region and MCS region, and the second filler sequence may be located between the intron region and exon region. In one embodiment, a viral genome may comprise two filler sequences, the first filler sequence may be located between the payload region and MCS region, and the second filler sequence may be located between the intron region and 3′ ITR. In one embodiment, a viral genome may comprise two filler sequences, the first filler sequence may be located between the payload region and MCS region, and the second filler sequence may be located between the enhancer region and polyadenylation signal sequence region. In one embodiment, a viral genome may comprise two filler sequences, the first filler sequence may be located between the payload region and MCS region, and the second filler sequence may be located between the enhancer region and MCS region. In one embodiment, a viral genome may comprise two filler sequences, the first filler sequence may be located between the payload region and MCS region, and the second filler sequence may be located between the enhancer region and exon region. In one embodiment, a viral genome may comprise two filler sequences, the first filler sequence may be located between the payload region and MCS region, and the second filler sequence may be located between the enhancer region and 3′ ITR. In one embodiment, a viral genome may comprise two filler sequences, the first filler sequence may be located between the payload region and MCS region, and the second filler sequence may be located between the polyadenylation signal sequence region and MCS region. In one embodiment, a viral genome may comprise two filler sequences, the first filler sequence may be located between the payload region and MCS region, and the second filler sequence may be located between the polyadenylation signal sequence region and exon region. In one embodiment, a viral genome may comprise two filler sequences, the first filler sequence may be located between the payload region and MCS region, and the second filler sequence may be located between the polyadenylation signal sequence region and 3′ ITR. In one embodiment, a viral genome may comprise two filler sequences, the first filler sequence may be located between the payload region and MCS region, and the second filler sequence may be located between the MCS region and exon region. In one embodiment, a viral genome may comprise two filler sequences, the first filler sequence may be located between the payload region and MCS region, and the second filler sequence may be located between the MCS region and 3′ ITR. In one embodiment, a viral genome may comprise two filler sequences, the first filler sequence may be located between the payload region and MCS region, and the second filler sequence may be located between the exon region and 3′ ITR.

[0264] In one embodiment, a viral genome may comprise two filler sequences, the first filler sequence may be located between the payload region and exon region, and the second filler sequence may be located between the intron region and enhancer region. In one embodiment, a viral genome may comprise two filler sequences, the first filler sequence may be located between the payload region and exon region, and the second filler sequence may be located between the intron region and polyadenylation signal sequence region. In one embodiment, a viral genome may comprise two filler sequences, the first filler sequence may be located between the payload region and exon region, and the second filler sequence may be located between the intron region and MCS region. In one embodiment, a viral genome may comprise two filler sequences, the first filler sequence may be located between the payload region and exon region, and the second filler sequence may be located between the intron region and exon region. In one embodiment, a viral genome may comprise two filler sequences, the first filler sequence may be located between the payload region and exon region, and the second filler sequence may be located between the intron region and 3′ ITR. In one embodiment, a viral genome may comprise two filler sequences, the first filler sequence may be located between the payload region and exon region, and the second filler sequence may be located between the enhancer region and polyadenylation signal sequence region. In one embodiment, a viral genome may comprise two filler sequences, the first filler sequence may be located between the payload region and exon region, and the second filler sequence may be located between the enhancer region and MCS region. In one embodiment, a viral genome may comprise two filler sequences, the first filler sequence may be located between the payload region and exon region, and the second filler sequence may be located between the enhancer region and exon region. In one embodiment, a viral genome may comprise two filler sequences, the first filler sequence may be located between the payload region and exon region, and the second filler sequence may be located between the enhancer region and 3′ ITR. In one embodiment, a viral genome may comprise two filler sequences, the first filler sequence may be located between the payload region and exon region, and the second filler sequence may be located between the polyadenylation signal sequence region and MCS region. In one embodiment, a viral genome may comprise two filler sequences, the first filler sequence may be located between the payload region and exon region, and the second filler sequence may be located between the polyadenylation signal sequence region and exon region. In one embodiment, a viral genome may comprise two filler sequences, the first filler sequence may be located between the payload region and exon region, and the second filler sequence may be located between the polyadenylation signal sequence region and 3′ ITR. In one embodiment, a viral genome may comprise two filler sequences, the first filler sequence may be located between the payload region and exon region, and the second filler sequence may be located between the MCS region and exon region. In one embodiment, a viral genome may comprise two filler sequences, the first filler sequence may be located between the payload region and exon region, and the second filler sequence may be located between the MCS region and 3′ ITR. In one embodiment, a viral genome may comprise two filler sequences, the first filler sequence may be located between the payload region and exon region, and the second filler sequence may be located between the exon region and 3′ ITR.

[0265] In one embodiment, a viral genome may comprise two filler sequences, the first filler sequence may be located between the payload region and 3′ ITR region, and the second filler sequence may be located between the intron region and enhancer region. In one embodiment, a viral genome may comprise two filler sequences, the first filler sequence may be located between the payload region and 3′ ITR region, and the second filler sequence may be located between the intron region and polyadenylation signal sequence region. In one embodiment, a viral genome may comprise two filler sequences, the first filler sequence may be located between the payload region and 3′ ITR region, and the second filler sequence may be located between the intron region and MCS region. In one embodiment, a viral genome may comprise two filler sequences, the first filler sequence may be located between the payload region and 3′ ITR region, and the second filler sequence may be located between the intron region and exon region. In one embodiment, a viral genome may comprise two filler sequences, the first filler sequence may be located between the payload region and 3′ ITR region, and the second filler sequence may be located between the intron region and 3′ ITR. In one embodiment, a viral genome may comprise two filler sequences, the first filler sequence may be located between the payload region and 3′ ITR region, and the second filler sequence may be located between the enhancer region and polyadenylation signal sequence region. In one embodiment, a viral genome may comprise two filler sequences, the first filler sequence may be located between the payload region and 3′ ITR region, and the second filler sequence may be located between the enhancer region and MCS region. In one embodiment, a viral genome may comprise two filler sequences, the first filler sequence may be located between the payload region and 3′ ITR region, and the second filler sequence may be located between the enhancer region and exon region. In one embodiment, a viral genome may comprise two filler sequences, the first filler sequence may be located between the payload region and 3′ ITR region, and the second filler sequence may be located between the enhancer region and 3′ ITR. In one embodiment, a viral genome may comprise two filler sequences, the first filler sequence may be located between the payload region and 3′ ITR region, and the second filler sequence may be located between the polyadenylation signal sequence region and MCS region. In one embodiment, a viral genome may comprise two filler sequences, the first filler sequence may be located between the payload region and 3′ ITR region, and the second filler sequence may be located between the polyadenylation signal sequence region and exon region. In one embodiment, a viral genome may comprise two filler sequences, the first filler sequence may be located between the payload region and 3′ ITR region, and the second filler sequence may be located between the polyadenylation signal sequence region and 3′ ITR. In one embodiment, a viral genome may comprise two filler sequences, the first filler sequence may be located between the payload region and 3′ ITR region, and the second filler sequence may be located between the MCS region and exon region. In one embodiment, a viral genome may comprise two filler sequences, the first filler sequence may be located between the payload region and 3′ ITR region, and the second filler sequence may be located between the MCS region and 3′ ITR. In one embodiment, a viral genome may comprise two filler sequences, the first filler sequence may be located between the payload region and 3′ ITR region, and the second filler sequence may be located between the exon region and 3′ ITR.

[0266] In one embodiment, a viral genome may comprise two filler sequences, the first filler sequence may be located between the intron region and enhancer region, and the second filler sequence may be located between the enhancer region and polyadenylation signal sequence region. In one embodiment, a viral genome may comprise two filler sequences, the first filler sequence may be located between the intron region and enhancer region, and the second filler sequence may be located between the enhancer region and MCS region. In one embodiment, a viral genome may comprise two filler sequences, the first filler sequence may be located between the intron region and enhancer region, and the second filler sequence may be located between the enhancer region and exon region. In one embodiment, a viral genome may comprise two filler sequences, the first filler sequence may be located between the intron region and enhancer region, and the second filler sequence may be located between the enhancer region and 3′ ITR. In one embodiment, a viral genome may comprise two filler sequences, the first filler sequence may be located between the intron region and enhancer region, and the second filler sequence may be located between the polyadenylation signal sequence region and MCS region. In one embodiment, a viral genome may comprise two filler sequences, the first filler sequence may be located between the intron region and enhancer region, and the second filler sequence may be located between the polyadenylation signal sequence region and exon region. In one embodiment, a viral genome may comprise two filler sequences, the first filler sequence may be located between the intron region and enhancer region, and the second filler sequence may be located between the polyadenylation signal sequence region and 3′ ITR. In one embodiment, a viral genome may comprise two filler sequences, the first filler sequence may be located between the intron region and enhancer region, and the second filler sequence may be located between the MCS region and exon region. In one embodiment, a viral genome may comprise two filler sequences, the first filler sequence may be located between the intron region and enhancer region, and the second filler sequence may be located between the MCS region and 3′ ITR. In one embodiment, a viral genome may comprise two filler sequences, the first filler sequence may be located between the intron region and enhancer region, and the second filler sequence may be located between the exon region and 3′ ITR.

[0267] In one embodiment, a viral genome may comprise two filler sequences, the first filler sequence may be located between the intron region and polyadenylation signal sequence region, and the second filler sequence may be located between the enhancer region and polyadenylation signal sequence region. In one embodiment, a viral genome may comprise two filler sequences, the first filler sequence may be located between the intron region and polyadenylation signal sequence region, and the second filler sequence may be located between the enhancer region and MCS region. In one embodiment, a viral genome may comprise two filler sequences, the first filler sequence may be located between the intron region and polyadenylation signal sequence region, and the second filler sequence may be located between the enhancer region and exon region. In one embodiment, a viral genome may comprise two filler sequences, the first filler sequence may be located between the intron region and polyadenylation signal sequence region, and the second filler sequence may be located between the enhancer region and 3′ ITR. In one embodiment, a viral genome may comprise two filler sequences, the first filler sequence may be located between the intron region and polyadenylation signal sequence region, and the second filler sequence may be located between the polyadenylation signal sequence region and MCS region. In one embodiment, a viral genome may comprise two filler sequences, the first filler sequence may be located between the intron region and polyadenylation signal sequence region, and the second filler sequence may be located between the polyadenylation signal sequence region and exon region. In one embodiment, a viral genome may comprise two filler sequences, the first filler sequence may be located between the intron region and polyadenylation signal sequence region, and the second filler sequence may be located between the polyadenylation signal sequence region and 3′ ITR. In one embodiment, a viral genome may comprise two filler sequences, the first filler sequence may be located between the intron region and polyadenylation signal sequence region, and the second filler sequence may be located between the MCS region and exon region. In one embodiment, a viral genome may comprise two filler sequences, the first filler sequence may be located between the intron region and polyadenylation signal sequence region, and the second filler sequence may be located between the MCS region and 3′ ITR. In one embodiment, a viral genome may comprise two filler sequences, the first filler sequence may be located between the intron region and polyadenylation signal sequence region, and the second filler sequence may be located between the exon region and 3′ ITR.

[0268] In one embodiment, a viral genome may comprise two filler sequences, the first filler sequence may be located between the intron region and MCS region, and the second filler sequence may be located between the enhancer region and polyadenylation signal sequence region. In one embodiment, a viral genome may comprise two filler sequences, the first filler sequence may be located between the intron region and MCS region, and the second filler sequence may be located between the enhancer region and MCS region. In one embodiment, a viral genome may comprise two filler sequences, the first filler sequence may be located between the intron region and MCS region, and the second filler sequence may be located between the enhancer region and exon region. In one embodiment, a viral genome may comprise two filler sequences, the first filler sequence may be located between the intron region and MCS region, and the second filler sequence may be located between the enhancer region and 3′ ITR. In one embodiment, a viral genome may comprise two filler sequences, the first filler sequence may be located between the intron region and MCS region, and the second filler sequence may be located between the polyadenylation signal sequence region and MCS region. In one embodiment, a viral genome may comprise two filler sequences, the first filler sequence may be located between the intron region and MCS region, and the second filler sequence may be located between the polyadenylation signal sequence region and exon region. In one embodiment, a viral genome may comprise two filler sequences, the first filler sequence may be located between the intron region and MCS region, and the second filler sequence may be located between the polyadenylation signal sequence region and 3′ ITR. In one embodiment, a viral genome may comprise two filler sequences, the first filler sequence may be located between the intron region and MCS region, and the second filler sequence may be located between the MCS region and exon region. In one embodiment, a viral genome may comprise two filler sequences, the first filler sequence may be located between the intron region and MCS region, and the second filler sequence may be located between the MCS region and 3′ ITR. In one embodiment, a viral genome may comprise two filler sequences, the first filler sequence may be located between the intron region and MCS region, and the second filler sequence may be located between the exon region and 3′ ITR.

[0269] In one embodiment, a viral genome may comprise two filler sequences, the first filler sequence may be located between the intron region and exon region, and the second filler sequence may be located between the enhancer region and polyadenylation signal sequence region. In one embodiment, a viral genome may comprise two filler sequences, the first filler sequence may be located between the intron region and exon region, and the second filler sequence may be located between the enhancer region and MCS region. In one embodiment, a viral genome may comprise two filler sequences, the first filler sequence may be located between the intron region and exon region, and the second filler sequence may be located between the enhancer region and exon region. In one embodiment, a viral genome may comprise two filler sequences, the first filler sequence may be located between the intron region and exon region, and the second filler sequence may be located between the enhancer region and 3′ ITR. In one embodiment, a viral genome may comprise two filler sequences, the first filler sequence may be located between the intron region and exon region, and the second filler sequence may be located between the polyadenylation signal sequence region and MCS region. In one embodiment, a viral genome may comprise two filler sequences, the first filler sequence may be located between the intron region and exon region, and the second filler sequence may be located between the polyadenylation signal sequence region and exon region. In one embodiment, a viral genome may comprise two filler sequences, the first filler sequence may be located between the intron region and exon region, and the second filler sequence may be located between the polyadenylation signal sequence region and 3′ ITR. In one embodiment, a viral genome may comprise two filler sequences, the first filler sequence may be located between the intron region and exon region, and the second filler sequence may be located between the MCS region and exon region. In one embodiment, a viral genome may comprise two filler sequences, the first filler sequence may be located between the intron region and exon region, and the second filler sequence may be located between the MCS region and 3′ ITR. In one embodiment, a viral genome may comprise two filler sequences, the first filler sequence may be located between the intron region and exon region, and the second filler sequence may be located between the exon region and 3′ ITR.

[0270] In one embodiment, a viral genome may comprise two filler sequences, the first filler sequence may be located between the intron region and 3′ITR, and the second filler sequence may be located between the enhancer region and polyadenylation signal sequence region. In one embodiment, a viral genome may comprise two filler sequences, the first filler sequence may be located between the intron region and 3′ITR, and the second filler sequence may be located between the enhancer region and MCS region. In one embodiment, a viral genome may comprise two filler sequences, the first filler sequence may be located between the intron region and 3′ITR, and the second filler sequence may be located between the enhancer region and exon region. In one embodiment, a viral genome may comprise two filler sequences, the first filler sequence may be located between the intron region and 3′ITR, and the second filler sequence may be located between the enhancer region and 3′ ITR. In one embodiment, a viral genome may comprise two filler sequences, the first filler sequence may be located between the intron region and 3′ITR, and the second filler sequence may be located between the polyadenylation signal sequence region and MCS region. In one embodiment, a viral genome may comprise two filler sequences, the first filler sequence may be located between the intron region and 3′ITR, and the second filler sequence may be located between the polyadenylation signal sequence region and exon region. In one embodiment, a viral genome may comprise two filler sequences, the first filler sequence may be located between the intron region and 3′ITR, and the second filler sequence may be located between the polyadenylation signal sequence region and 3′ ITR. In one embodiment, a viral genome may comprise two filler sequences, the first filler sequence may be located between the intron region and 3′ITR, and the second filler sequence may be located between the MCS region and exon region. In one embodiment, a viral genome may comprise two filler sequences, the first filler sequence may be located between the intron region and 3′ITR, and the second filler sequence may be located between the MCS region and 3′ ITR. In one embodiment, a viral genome may comprise two filler sequences, the first filler sequence may be located between the intron region and 3′ITR, and the second filler sequence may be located between the exon region and 3′ ITR.

[0271] In one embodiment, a viral genome may comprise two filler sequences, the first filler sequence may be located between the enhancer region and polyadenylation signal sequence region, and the second filler sequence may be located between the polyadenylation signal sequence region and MCS region. In one embodiment, a viral genome may comprise two filler sequences, the first filler sequence may be located between the enhancer region and polyadenylation signal sequence region, and the second filler sequence may be located between the polyadenylation signal sequence region and exon region. In one embodiment, a viral genome may comprise two filler sequences, the first filler sequence may be located between the enhancer region and polyadenylation signal sequence region, and the second filler sequence may be located between the polyadenylation signal sequence region and 3′ ITR. In one embodiment, a viral genome may comprise two filler sequences, the first filler sequence may be located between the enhancer region and polyadenylation signal sequence region, and the second filler sequence may be located between the MCS region and exon region. In one embodiment, a viral genome may comprise two filler sequences, the first filler sequence may be located between the enhancer region and polyadenylation signal sequence region, and the second filler sequence may be located between the MCS region and 3′ ITR. In one embodiment, a viral genome may comprise two filler sequences, the first filler sequence may be located between the enhancer region and polyadenylation signal sequence region, and the second filler sequence may be located between the exon region and 3′ ITR.

[0272] In one embodiment, a viral genome may comprise two filler sequences, the first filler sequence may be located between the enhancer region and MCS region, and the second filler sequence may be located between the polyadenylation signal sequence region and MCS region. In one embodiment, a viral genome may comprise two filler sequences, the first filler sequence may be located between the enhancer region and MCS region, and the second filler sequence may be located between the polyadenylation signal sequence region and exon region. In one embodiment, a viral genome may comprise two filler sequences, the first filler sequence may be located between the enhancer region and MCS region, and the second filler sequence may be located between the polyadenylation signal sequence region and 3′ ITR. In one embodiment, a viral genome may comprise two filler sequences, the first filler sequence may be located between the enhancer region and MCS region, and the second filler sequence may be located between the MCS region and exon region. In one embodiment, a viral genome may comprise two filler sequences, the first filler sequence may be located between the enhancer region and MCS region, and the second filler sequence may be located between the MCS region and 3′ ITR. In one embodiment, a viral genome may comprise two filler sequences, the first filler sequence may be located between the enhancer region and MCS region, and the second filler sequence may be located between the exon region and 3′ ITR.

[0273] In one embodiment, a viral genome may comprise two filler sequences, the first filler sequence may be located between the enhancer region and exon region, and the second filler sequence may be located between the polyadenylation signal sequence region and MCS region. In one embodiment, a viral genome may comprise two filler sequences, the first filler sequence may be located between the enhancer region and exon region, and the second filler sequence may be located between the polyadenylation signal sequence region and exon region. In one embodiment, a viral genome may comprise two filler sequences, the first filler sequence may be located between the enhancer region and exon region, and the second filler sequence may be located between the polyadenylation signal sequence region and 3′ ITR. In one embodiment, a viral genome may comprise two filler sequences, the first filler sequence may be located between the enhancer region and exon region, and the second filler sequence may be located between the MCS region and exon region. In one embodiment, a viral genome may comprise two filler sequences, the first filler sequence may be located between the enhancer region and exon region, and the second filler sequence may be located between the MCS region and 3′ ITR. In one embodiment, a viral genome may comprise two filler sequences, the first filler sequence may be located between the enhancer region and exon region, and the second filler sequence may be located between the exon region and 3′ ITR.

[0274] In one embodiment, a viral genome may comprise two filler sequences, the first filler sequence may be located between the enhancer region and 3′ ITR, and the second filler sequence may be located between the polyadenylation signal sequence region and MCS region. In one embodiment, a viral genome may comprise two filler sequences, the first filler sequence may be located between the enhancer region and 3′ ITR, and the second filler sequence may be located between the polyadenylation signal sequence region and exon region. In one embodiment, a viral genome may comprise two filler sequences, the first filler sequence may be located between the enhancer region and 3′ ITR, and the second filler sequence may be located between the polyadenylation signal sequence region and 3′ ITR. In one embodiment, a viral genome may comprise two filler sequences, the first filler sequence may be located between the enhancer region and 3′ ITR, and the second filler sequence may be located between the MCS region and exon region. In one embodiment, a viral genome may comprise two filler sequences, the first filler sequence may be located between the enhancer region and 3′ ITR, and the second filler sequence may be located between the MCS region and 3′ ITR. In one embodiment, a viral genome may comprise two filler sequences, the first filler sequence may be located between the enhancer region and 3′ ITR, and the second filler sequence may be located between the exon region and 3′ ITR.

[0275] In one embodiment, a viral genome may comprise two filler sequences, the first filler sequence may be located between the polyadenylation signal sequence region and MCS region, and the second filler sequence may be located between the MCS region and exon region. In one embodiment, a viral genome may comprise two filler sequences, the first filler sequence may be located between the polyadenylation signal sequence region and MCS region, and the second filler sequence may be located between the MCS region and 3′ ITR. In one embodiment, a viral genome may comprise two filler sequences, the first filler sequence may be located between the polyadenylation signal sequence region and MCS region, and the second filler sequence may be located between the exon region and 3′ ITR.

[0276] In one embodiment, a viral genome may comprise two filler sequences, the first filler sequence may be located between the polyadenylation signal sequence region and exon region, and the second filler sequence may be located between the MCS region and exon region. In one embodiment, a viral genome may comprise two filler sequences, the first filler sequence may be located between the polyadenylation signal sequence region and exon region, and the second filler sequence may be located between the MCS region and 3′ ITR. In one embodiment, a viral genome may comprise two filler sequences, the first filler sequence may be located between the polyadenylation signal sequence region and exon region, and the second filler sequence may be located between the exon region and 3′ ITR.

[0277] In one embodiment, a viral genome may comprise two filler sequences, the first filler sequence may be located between the polyadenylation signal sequence region and 3′ ITR, and the second filler sequence may be located between the MCS region and exon region. In one embodiment, a viral genome may comprise two filler sequences, the first filler sequence may be located between the polyadenylation signal sequence region and 3′ ITR, and the second filler sequence may be located between the MCS region and 3′ ITR. In one embodiment, a viral genome may comprise two filler sequences, the first filler sequence may be located between the polyadenylation signal sequence region and 3′ ITR, and the second filler sequence may be located between the exon region and 3′ ITR.

[0278] In one embodiment, a viral genome may comprise two filler sequences, the first filler sequence may be located between the MCS region and exon region, and the second filler sequence may be located between the exon region and 3′ ITR.

### Payloads of the Invention

[0279] The AAV particles of the present disclosure comprise at least one payload region. As used herein, “payload” or “payload region” refers to one or more polynucleotides or polynucleotide regions encoded by or within a viral genome or an expression product of such polynucleotide or polynucleotide region, e.g., a transgene, a polynucleotide encoding a polypeptide or multi-polypeptide or a modulatory nucleic acid or regulatory nucleic acid. Payloads of the present invention typically encode modulatory polynucleotides or fragments or variants thereof.

[0280] The payload region may be constructed in such a way as to reflect a region similar to or mirroring the natural organization of an mRNA.

[0281] The payload region may comprise a combination of coding and non-coding nucleic acid sequences.

[0282] In some embodiments, the AAV payload region may encode a coding or non-coding RNA.

[0283] In one embodiment, the AAV particle comprises a viral genome with a payload region comprising nucleic acid sequences encoding a siRNA, miRNA or other RNAi agent. In such an embodiment, a viral genome encoding more than one polypeptide may be replicated and packaged into a viral particle. A target cell transduced with a viral particle may express the encoded siRNA, miRNA or other RNAi agent inside a single cell.

### Modulatory Polynucleotides

[0284] In one embodiment, modulatory polynucleotides, e.g., RNA or DNA molecules, may be used to treat neurodegenerative disease, in particular, amyotrophic lateral sclerosis (ALS). As used herein, a “modulatory polynucleotide” is any nucleic acid sequence(s) which functions to modulate (either increase or decrease) the level or amount of a target gene, e.g., mRNA or protein levels.

[0285] In one embodiment, the modulatory polynucleotides may comprise at least one nucleic acid sequence encoding at least one siRNA molecule. The nucleic acids may, independently if there is more than one, encode 1, 2, 3, 4, 5, 6, 7, 8, 9, or more than 9 siRNA molecules.

[0286] In one embodiment, the molecular scaffold may be located downstream of a CMV promoter, fragment or variant thereof.

[0287] In one embodiment, the molecular scaffold may be located downstream of a CBA promoter, fragment or variant thereof.

[0288] In one embodiment, the molecular scaffold may be a natural pri-miRNA scaffold located downstream of a CMV promoter. As a non-limiting example, the natural pri-miRNA scaffold is derived from the human miR155 scaffold.

[0289] In one embodiment, the molecular scaffold may be a natural pri-miRNA scaffold located downstream of a CBA promoter.

[0290] In one embodiment, the selection of a molecular scaffold and modulatory polynucleotide is determined by a method of comparing modulatory polynucleotides in pri-miRNA (see e.g., the method described by Miniarikova et al. Design, Characterization, and Lead Selection of Therapeutic miRNAs Targeting Huntingtin for Development of Gene Therapy for Huntington's Disease. Molecular Therapy-Nucleic Acids (2016) 5, e297 and International Publication No. WO2016102664; the contents of each of which are herein incorporated by reference in their entireties). To evaluate the activities of the modulatory polynucleotides, the molecular scaffold used which may be used is a human pri-miRNA scaffold (e.g., miR155 scaffold) and the promoter may be CMV. The activity may be determined in vitro using HEK293T cells and a reporter (e.g., Luciferase).

[0291] In order to evaluate the optimal molecular scaffold for the modulatory polynucleotide, the modulatory polynucleotide is used in pri-miRNA scaffolds with a CAG promoter. The constructs are co-transfected with a reporter (e.g., luciferase reporter) at 50 ng. Constructs with greater than 80% knockdown at 50 ng co-transfection are considered efficient. In one aspect, the constructs with strong guide-strand activity are preferred. The molecular scaffolds can be processed in HEK293T cells by NGS to determine guide-passenger ratios, and processing variability.

[0292] To evaluate the molecular scaffolds and modulatory polynucleotides in vivo the molecular scaffolds comprising the modulatory polynucleotides are packaged in AAV (e.g., the serotype may be AAV5 (see e.g., the method and constructs described in WO2015060722, the contents of which are herein incorporated by reference in their entirety)) and administered to an in vivo model and the guide-passenger ratios, 5′ and 3′ end processing, ratio of guide to passenger strands, and knockdown can be determined in different areas of the model (e.g., tissue regions).

[0293] In one embodiment, the selection of a molecular scaffold and modulatory polynucleotide is determined by a method of comparing modulatory polynucleotides in natural pri-miRNA and synthetic pri-miRNA. The modulatory polynucleotide may, but it not limited to, targeting an exon other than exon 1. To evaluate the activities of the modulatory polynucleotides, the molecular scaffold is used with a CBA promoter. In one aspect, the activity may be determined in vitro using HEK293T cells, HeLa cell and a reporter (e.g., Luciferase) and knockdown efficient modulatory polynucleotides showed SOD1 knockdown of at least 80% in the cell tested. Additionally, the modulatory polynucleotides which are considered most efficient showed low to no significant passenger strand (p-strand) activity. In another aspect, the endogenous SOD1 knockdown efficacy is evaluated by transfection in vitro using HEK293T cells, HeLa cell and a reporter. Efficient modulatory polynucleotides show greater than 50% endogenous SOD1 knockdown. In yet another aspect, the endogenous SOD1 knockdown efficacy is evaluated in different cell types (e.g., HEK293, HeLa, primary astrocytes. U251 astrocytes, SH-SY5Y neuron cells and fibroblasts from ALS patients) by infection (e.g., AAV2). Efficient modulatory polynucleotides show greater than 60% endogenous SOD1 knockdown.

[0294] To evaluate the molecular scaffolds and modulatory polynucleotides in vivo the molecular scaffolds comprising the modulatory polynucleotides are packaged in AAV and administered to an in vivo model and the guide-passenger ratios, 5′ and 3′ end processing, ratio of guide to passenger strands, and knockdown can be determined in different areas of the model (e.g., tissue regions). The molecular scaffolds can be processed from in vivo samples by NGS to determine guide-passenger ratios, and processing variability.

[0295] In one embodiment, the modulatory polynucleotide is designed using at least one of the following properties: loop variant, seed mismatch/bulge/wobble variant, stem mismatch, loop variant and vassal stem mismatch variant, seed mismatch and basal stem mismatch variant, stem mismatch and basal stem mismatch variant, seed wobble and basal stem wobble variant, or a stem sequence variant.

siRNA Molecules

[0296] The present invention relates to RNA interference (RNAi) induced inhibition of gene expression for treating neurodegenerative disorders. Provided herein are siRNA duplexes or encoded dsRNA that target the gene of interest (referred to herein collectively as “siRNA molecules”). Such siRNA duplexes or encoded dsRNA can reduce or silence gene expression in cells, such as but not limited to, medium spiny neurons, cortical neurons and/or astrocytes.

[0297] RNAi (also known as post-transcriptional gene silencing (PTGS), quelling, or co-suppression) is a post-transcriptional gene silencing process in which RNA molecules, in a sequence specific manner, inhibit gene expression, typically by causing the destruction of specific mRNA molecules. The active components of RNAi are short/small double stranded RNAs (dsRNAs), called small interfering RNAs (siRNAs), that typically contain 15-30 nucleotides (e.g., 19 to 25, 19 to 24 or 19-21 nucleotides) and 2 nucleotide 3′ overhangs and that match the nucleic acid sequence of the target gene. These short RNA species may be naturally produced in vivo by Dicer-mediated cleavage of larger dsRNAs and they are functional in mammalian cells.

[0298] Naturally expressed small RNA molecules, named microRNAs (miRNAs), elicit gene silencing by regulating the expression of mRNAs. The miRNAs containing RNA Induced Silencing Complex (RISC) targets mRNAs presenting a perfect sequence complementarity with nucleotides 2-7 in the 5′region of the miRNA which is called the seed region, and other base pairs with its 3′region, miRNA mediated down regulation of gene expression may be caused by cleavage of the target mRNAs, translational inhibition of the target mRNAs, or mRNA decay, miRNA targeting sequences are usually located in the 3′-UTR of the target mRNAs. A single miRNA may target more than 100 transcripts from various genes, and one mRNA may be targeted by different miRNAs.

[0299] siRNA duplexes or dsRNA targeting a specific mRNA may be designed and synthesized in vitro and introduced into cells for activating RNAi processes. Elbashir et al. demonstrated that 21-nucleotide siRNA duplexes (termed small interfering RNAs) were capable of effecting potent and specific gene knockdown without inducing immune response in mammalian cells (Elbashir S M et al., Nature, 2001, 411, 494-498). Since this initial report, post-transcriptional gene silencing by siRNAs quickly emerged as a powerful tool for genetic analysis in mammalian cells and has the potential to produce novel therapeutics.

[0300] RNAi molecules which were designed to target against a nucleic acid sequence that encodes poly-glutamine repeat proteins which cause poly-glutamine expansion diseases such as Huntington's Disease, are described in U.S. Pat. Nos. 9,169,483 and 9,181,544 and International Patent Publication No. WO2015179525, the content of each of which is herein incorporated by reference in their entirety. U.S. Pat. Nos. 9,169,483 and 9,181,544 and International Patent Publication No. WO2015179525 each provide isolated RNA duplexes comprising a first strand of RNA (e.g., 15 contiguous nucleotides) and second strand of RNA (e.g., complementary to at least 12 contiguous nucleotides of the first strand) where the RNA duplex is about 15 to 30 base pairs in length. The first strand of RNA and second strand of RNA may be operably linked by an RNA loop (˜4 to 50 nucleotides) to form a hairpin structure which may be inserted into an expression cassette. Non-limiting examples of loop portions include SEQ ID NO: 9-14 of U.S. Pat. No. 9,169,483, the content of which is herein incorporated by reference in its entirety. Non-limiting examples of strands of RNA which may be used, either full sequence or part of the sequence, to form RNA duplexes include SEQ ID NO: 1-8 of U.S. Pat. No. 9,169,483 and SEQ ID NO: 1-11, 33-59, 208-210, 213-215 and 218-221 of U.S. Pat. No. 9,181,544, the contents of each of which is herein incorporated by reference in its entirety. Non-limiting examples of RNAi molecules include SEQ ID NOs: 1-8 of U.S. Pat. No. 9,169,483, SEQ ID NOs: 1-11, 33-59, 208-210, 213-215 and 218-221 of U.S. Pat. No. 9,181,544 and SEQ ID NOs: 1, 6, 7, and 35-38 of International Patent Publication No. WO02015179525, the contents of each of which is herein incorporated by reference in their entirety.

[0301] In vitro synthetized siRNA molecules may be introduced into cells in order to activate RNAi. An exogenous siRNA duplex, when it is introduced into cells, similar to the endogenous dsRNAs, can be assembled to form the RNA Induced Silencing Complex (RISC), a multiunit complex that interacts with RNA sequences that are complementary to one of the two strands of the siRNA duplex (i.e., the antisense strand). During the process, the sense strand (or passenger strand) of the siRNA is lost from the complex, while the antisense strand (or guide strand) of the siRNA is matched with its complementary RNA. In particular, the targets of siRNA containing RISC complexes are mRNAs presenting a perfect sequence complementarity. Then, siRNA mediated gene silencing occurs by cleaving, releasing and degrading the target.

[0302] The siRNA duplex comprised of a sense strand homologous to the target mRNA and an antisense strand that is complementary to the target mRNA offers much more advantage in terms of efficiency for target RNA destruction compared to the use of the single strand (ss)-siRNAs (e.g. antisense strand RNA or antisense oligonucleotides). In many cases, it requires higher concentration of the ss-siRNA to achieve the effective gene silencing potency of the corresponding duplex.

[0303] Any of the foregoing molecules may be encoded by a viral genome.

Design and Sequences of siRNA Duplexes Targeting Gene of Interest

[0304] The present invention provides small interfering RNA (siRNA) duplexes (and modulatory polynucleotides encoding them) that target mRNA to interfere with gene expression and/or protein production.

[0305] The encoded siRNA duplex of the present invention contains an antisense strand and a sense strand hybridized together forming a duplex structure, wherein the antisense strand is complementary to the nucleic acid sequence of the targeted gene, and wherein the sense strand is homologous to the nucleic acid sequence of the targeted gene. In some aspects, the 5′end of the antisense strand has a 5′ phosphate group and the 3′end of the sense strand contains a 3′hydroxyl group. In other aspects, there are none, one or 2 nucleotide overhangs at the 3′end of each strand.

[0306] Some guidelines for designing siRNAs have been proposed in the art. These guidelines generally recommend generating a 19-nucleotide duplexed region, symmetric 2-3 nucleotide 3′overhangs, 5′-phosphate and 3′-hydroxyl groups targeting a region in the gene to be silenced. Other rules that may govern siRNA sequence preference include, but are not limited to, (i) A/U at the 5′ end of the antisense strand; (ii) G/C at the 5′ end of the sense strand; (iii) at least five A/U residues in the 5′ terminal one-third of the antisense strand: and (iv) the absence of any GC stretch of more than 9 nucleotides in length. In accordance with such consideration, together with the specific sequence of a target gene, highly effective siRNA molecules essential for suppressing mammalian target gene expression may be readily designed.

[0307] According to the present invention, siRNA molecules (e.g., siRNA duplexes or encoded dsRNA) that target the gene of interest are designed. Such siRNA molecules can specifically, suppress gene expression and protein production. In some aspects, the siRNA molecules are designed and used to selectively “knock out” gene variants in cells, i.e., mutated transcripts. In some aspects, the siRNA molecules are designed and used to selectively “knock down” gene variants in cells. In other aspects, the siRNA molecules are able to inhibit or suppress both the wild type and mutated version of the gene of interest.

[0308] In one embodiment, an siRNA molecule of the present invention comprises a sense strand and a complementary antisense strand in which both strands are hybridized together to form a duplex structure. The antisense strand has sufficient complementarity to the target mRNA sequence to direct target-specific RNAi, i.e., the siRNA molecule has a sequence sufficient to trigger the destruction of the target mRNA by the RNAi machinery or process.

[0309] In one embodiment, an siRNA molecule of the present invention comprises a sense strand and a complementary antisense strand in which both strands are hybridized together to form a duplex structure and where the start site of the hybridization to the mRNA is between nucleotide 10 and 1000 on the target mRNA sequence. As a non-limiting example, the start site may be between nucleotide 10-20, 20-30, 30-40, 40-50, 60-70, 70-80, 80-90, 90-100, 100-150, 150-200, 200-250, 250-300, 300-350, 350-400, 400-450, 450-500, 500-550, 550-600, 600-650, 650-700, 700-70, 750-800, 800-850, 850-900, 900-950, 950-1000, on the target mRNA sequence. As yet another non-limiting example, the start site may be nucleotide 10, 11, 12, 13, 14, 15, 16, 17, 18, 19, 20, 21, 22, 23, 24, 25, 26, 27, 28, 29, 30, 31, 32, 33, 34, 35, 36, 37, 38, 39, 40, 41, 42, 43, 44, 45, 46, 47, 48, 49, 50, 51, 52, 53, 54, 55, 56, 57, 58, 59, 60, 61, 62, 63, 64, 65, 66, 67, 68, 69, 70, 71, 72, 73, 74, 75, 76, 77, 78, 79, 80, 81, 82, 83, 84, 85, 86, 87, 88, 89, 90, 91, 92, 93, 94, 95, 96, 97, 98, 99, 100, 101, 102, 103, 104, 105, 106, 107, 108, 109, 110, 111, 112, 113, 114, 115, 116, 117, 118, 119, 120, 121, 122, 123, 124, 125, 126, 127, 128, 129, 130, 131, 132, 133, 134, 135, 136, 137, 138, 139, 140, 141, 142, 143, 144, 145, 146, 147, 148, 149, 150, 151, 152, 153, 154, 155, 156, 157, 158, 159, 160, 161, 162, 163, 164, 165, 166, 167, 168, 169, 170, 171, 172, 173, 174, 175, 176, 177, 178, 179, 180, 181, 182, 183, 184, 185, 186, 187, 188, 189, 190, 191, 192, 193, 194, 195, 196, 197, 198, 199, 200, 201, 202, 203, 204, 205, 206, 207, 208, 209, 210, 211, 212, 213, 214, 215, 216, 217, 218, 219, 220, 221, 222, 223, 224, 225, 226, 227, 228, 229, 230, 231, 232, 233, 234, 235, 236, 237, 238, 239, 240, 241, 242, 243, 244, 245, 246, 247, 248, 249, 250, 251, 252, 253, 254, 255, 256, 257, 258, 259, 260, 261, 262, 263, 264, 265, 266, 267, 268, 269, 270, 271, 272, 273, 274, 275, 276, 277, 278, 279, 280, 281, 282, 283, 284, 285, 286, 287, 288, 289, 290, 291, 292, 293, 294, 295, 296, 297, 298, 299, 300, 301, 302, 303, 304, 305, 306, 307, 308, 309, 310, 311, 312, 313, 314, 315, 316, 317, 318, 319, 320, 321, 322, 323, 324, 325, 326, 327, 328, 329, 330, 331, 332, 333, 334, 335, 336, 337, 338, 339, 340, 341, 342, 343, 344, 345, 346, 347, 348, 349, 350, 351, 352, 353, 354, 355, 356, 357, 358, 359, 360, 361, 362, 363, 364, 365, 366, 367, 368, 369, 370, 371, 372, 373, 374, 375, 376, 377, 378, 379, 380, 381, 382, 383, 384, 385, 386, 387, 388, 389, 390, 391, 392, 393, 394, 395, 396, 397, 398, 399, 400, 401, 402, 403, 404, 405, 406, 407, 408, 409, 410, 411, 412, 413, 414, 415, 416, 417, 418, 419, 420, 421, 422, 423, 424, 425, 426, 427, 428, 429, 430, 431, 432, 433, 434, 435, 436, 437, 438, 439, 440, 441, 442, 443, 444, 445, 446, 447, 448, 449, 450, 451, 452, 453, 454, 455, 456, 457, 458, 459, 460, 461, 462, 463, 464, 465, 466, 467, 468, 469, 470, 471, 472, 473, 474, 475, 476, 477, 478, 479, 480, 481, 482, 483, 484, 485, 486, 487, 488, 489, 490, 491, 492, 493, 494, 495, 496, 497, 498, 499, 500, 501, 502, 503, 504, 505, 506, 507, 508, 509, 510, 511, 512, 513, 514, 515, 516, 517, 518, 519, 520, 521, 522, 523, 524, 525, 526, 527, 528, 529, 530, 531, 532, 533, 534, 535, 536, 537, 538, 539, 540, 541, 542, 543, 544, 545, 546, 547, 548, 549, 550, 551, 552, 553, 554, 555, 556, 557, 558, 559, 560, 561, 562, 563, 564, 565, 566, 567, 568, 569, 570, 571, 572, 573, 574, 575, 576, 577, 578, 579, 580, 581, 582, 583, 584, 585, 586, 587, 588, 589, 590, 591, 592, 593, 594, 595, 596, 597, 598, 599, 600, 601, 602, 603, 604, 605, 606, 607, 608, 609, 610, 611, 612, 613, 614, 615, 616, 617, 618, 619, 620, 621, 622, 623, 624, 625, 626, 627, 628, 629, 630, 631, 632, 633, 634, 635, 636, 637, 638, 639, 640, 641, 642, 643, 644, 645, 646, 647, 648, 649, 650, 651, 652, 653, 654, 655, 656, 657, 658, 659, 660, 661, 662, 663, 664, 665, 666, 667, 668, 669, 670, 671, 672, 673, 674, 675, 676, 677, 678, 679, 680, 681, 682, 683, 684, 685, 686, 687, 688, 689, 690, 691, 692, 693, 694, 695, 696, 697, 698, 699, 700, 701, 702, 703, 704, 705, 706, 707, 708, 709, 710, 711, 712, 713, 714, 715, 716, 717, 718, 719, 720, 721, 722, 723, 724, 725, 726, 727, 728, 729, 730, 731, 732, 733, 734, 735, 736, 737, 738, 739, 740, 741, 742, 743, 744, 745, 746, 747, 748, 749, 750, 751, 752, 753, 754, 755, 756, 757, 758, 759, 760, 761, 762, 763, 764, 765, 766, 767, 768, 769, 770, 771, 772, 773, 774, 775, 776, 777, 778, 779, 780, 781, 782, 783, 784, 785, 786, 787, 788, 789, 790, 791, 792, 793, 794, 795, 796, 797, 798, 799, 800, 801, 802, 803, 804, 805, 806, 807, 808, 809, 810, 811, 812, 813, 814, 815, 816, 817, 818, 819, 820, 821, 822, 823, 824, 825, 826, 827, 828, 829, 830, 831, 832, 833, 834, 835, 836, 837, 838, 839, 840, 841, 842, 843, 844, 845, 846, 847, 848, 849, 850, 851, 852, 853, 854, 855, 856, 857, 858, 859, 860, 861, 862, 863, 864, 865, 866, 867, 868, 869, 870, 871, 872, 873, 874, 875, 876, 877, 878, 879, 880, 881, 882, 883, 884, 885, 886, 887, 888, 889, 890, 891, 892, 893, 894, 895, 896, 897, 898, 899, 900, 901, 902, 903, 904, 905, 906, 907, 908, 909, 910, 911, 912, 913, 914, 915, 916, 917, 918, 919, 920, 921, 922, 923, 924, 925, 926, 927, 928, 929, 930, 931, 932, 933, 934, 935, 936, 937, 938, 939, 940, 941, 942, 943, 944, 945, 946, 947, 948, 949, 950, 951, 952, 953, 954, 955, 956, 957, 958, 959, 960, 961, 962, 963, 964, 965, 966, 967, 968, 969, 970, 971, 972, 973, 974, 975, 976, 977, 978, 979, 980, 981, 982, 983, 984, 985, 986, 987, 988, 989, 990, 991, 992, 993, 994, 995, 996, 997, 998, 999, and 1000 on the target mRNA sequence.

[0310] In some embodiments, the antisense strand and target mRNA sequences have 100% complementarity. The antisense strand may be complementary to any part of the target mRNA sequence.

[0311] In other embodiments, the antisense strand and target mRNA sequences comprise at least one mismatch. As a non-limiting example, the antisense strand and the target mRNA sequence have at least 30%, 40%, 50%, 60%, 70%, 80%, 81%, 82%, 83%, 84%, 85%, 86%, 87%, 88%, 89%, 90%, 91%, 92%, 93%, 94%, 95%, 96%, 97%, 98% or 99% or at least 20-30%, 20-40%, 20-50%, 20-60%, 20-70%, 20-80%, 20-90%, 20-95%, 20-99%, 30-40%, 30-50%, 30-60%, 30-70%, 30-80%, 30-90%, 30-95%, 30-99%, 40-50%, 40-60%, 40-70%, 40-80%, 40-90%, 40-95%, 40-99%, 50-60%, 50-70%, 50-80%, 50-90%, 50-95%, 50-99%, 60-70%, 60-80%, 60-90%, 60-95%, 60-99%, 70-80%, 70-90%, 70-95%, 70-99%, 80-90%, 80-95%, 80-99%, 90-95%, 90-99% or 95-99% complementarity.

[0312] In one embodiment, an siRNA or dsRNA includes at least two sequences that are complementary to each other.

[0313] According to the present invention, the siRNA molecule has a length from about 10-50 or more nucleotides, i.e., each strand comprising 10-50 nucleotides (or nucleotide analogs). Preferably, the siRNA molecule has a length from about 15-30, e.g., 15, 16, 17, 18, 19, 20, 21, 22, 23, 24, 25, 26, 27, 28, 29, or 30 nucleotides in each strand, wherein one of the strands is sufficiently complementarity to a target region. In one embodiment, each strand of the siRNA molecule has a length from about 19 to 25, 19 to 24 or 19 to 21 nucleotides. In one embodiment, at least one strand of the siRNA molecule is 19 nucleotides in length. In one embodiment, at least one strand of the siRNA molecule is 20 nucleotides in length. In one embodiment, at least one strand of the siRNA molecule is 21 nucleotides in length. In one embodiment, at least one strand of the siRNA molecule is 22 nucleotides in length. In one embodiment, at least one strand of the siRNA molecule is 23 nucleotides in length. In one embodiment, at least one strand of the siRNA molecule is 24 nucleotides in length. In one embodiment, at least one strand of the siRNA molecule is 25 nucleotides in length.

[0314] In some embodiments, the siRNA molecules of the present invention can be synthetic RNA duplexes comprising about 19 nucleotides to about 25 nucleotides, and two overhanging nucleotides at the 3′-end. In some aspects, the siRNA molecules may be unmodified RNA molecules. In other aspects, the siRNA molecules may contain at least one modified nucleotide, such as base, sugar or backbone modifications.

[0315] In one embodiment, the siRNA molecules of the present invention may comprise an antisense sequence and a sense sequence, or a fragment or variant thereof. As a non-limiting example, the antisense sequence and the sense sequence have at least 30%, 40%, 50%, 60%, 70%, 80%, 81%, 82%, 83%, 84%, 85%, 86%, 87%, 88%, 89%, 90%, 91%, 92%, 93%, 94%, 95%, 96%, 97%, 98% or 99% or at least 20-30%, 20-40%, 20-50%, 20-60%, 20-70%, 20-80%, 20-90%, 20-95%, 20-99%, 30-40%, 30-50%, 30-60%, 30-70%, 30-80%, 30-90%, 30-95%, 30-99%, 40-50%, 40-60%, 40-70%, 40-80%, 40-90%, 40-95%, 40-99%, 50-60%, 50-70%, 50-80%, 50-90%, 50-95%, 50-99%, 60-70%, 60-80%, 60-90%, 60-95%, 60-99%, 70-80%, 70-90%, 70-95%, 70-99%, 80-90%, 80-95%, 80-99%, 90-95%, 90-99% or 95-99% complementarity.

[0316] In other embodiments, the siRNA molecules of the present invention can be encoded in plasmid vectors, AAV particles, viral genome or other nucleic acid expression vectors for delivery to a cell.

[0317] DNA expression plasmids can be used to stably express the siRNA duplexes or dsRNA of the present invention in cells and achieve long-term inhibition of the target gene expression. In one aspect, the sense and antisense strands of a siRNA duplex are typically linked by a short spacer sequence leading to the expression of a stem-loop structure termed short hairpin RNA (shRNA). The hairpin is recognized and cleaved by Dicer, thus generating mature siRNA molecules.

[0318] According to the present invention. AAV particles comprising the nucleic acids encoding the siRNA molecules targeting the mRNA are produced, the AAV serotypes may be any of the serotypes listed in Table 1. Non-limiting examples of the AAV serotypes include, AAV1, AAV2, AAV3, AAV4, AAV5, AAV6, AAV7, AAV8, AAV9, AAV9,47, AAV9(hu14), AAV10, AAV11, AAV12, AAVrh8, AAVrh10, AAV-DJ8, AAV-DJ, AAV-PHP.A. AAV-PHP.B, AAVPHP.B2, AAVPHP.B3, AAVPHP.N/PHP.B-DGT, AAVPHP.B-EST, AAVPHP.B-GGT, AAVPHP.B-ATP, AAVPHP.B-ATT-T, AAVPHP.B-DGT-T, AAVPHP.B-GGT-T, AAVPHP.B-SGS, AAVPHP.B-AQP, AAVPHP.B-QQP, AAVPHP.B-SNP(3), AAVPHP.B-SNP, AAVPHP.B-QGT, AAVPHP.B-NQT, AAVPHP.B-EGS, AAVPHP.B-SGN, AAVPHP.B-EGT, AAVPHP.B-DST, AAVPHP.B-DST, AAVPHP.B-STP, AAVPHP.B-PQP, AAVPHP.B-SQP, AAVPHP.B-QLP, AAVPHP.B-TMP, AAVPHP.B-TTP AAVPHP.S/G2A12, AAVG2A15/G2A3, AAVG2B4, AAVG2B5, and variants thereof.

[0319] In some embodiments, the siRNA duplexes or encoded dsRNA of the present invention suppress (or degrade) the target mRNA. Accordingly, the siRNA duplexes or encoded dsRNA can be used to substantially inhibit the gene expression in a cell, for example a neuron. In some aspects, the inhibition of the gene expression refers to an inhibition by at least about 20%, preferably by at least about 30%, 40%, 41%, 42%, 43%, 44%, 45%, 46%, 47%, 48%, 49%, 50%, 51%, 52%, 53%, 54%, 55%, 56%, 57%, 58%, 59%, 60%, 70%, 71%, 72%, 73%, 74%, 75%, 76%, 77%, 78%, 79%, 80%, 81%, 82%, 83%, 84%, 85%, 90%, 95% and 100%, or at least 20-30%, 20-40%, 20-50%, 20-60%, 20-70%, 20-80%, 20-90%, 20-95%, 20-100%, 30-40%, 30-50%, 30-60%, 30-70%, 30-80%, 30-90%, 30-95%, 30-100%, 40-50%, 40-60%, 40-70%, 40-80%, 40-90%, 40-95%, 40-100%, 45-50%, 45-55%, 50-60%, 50-70%, 50-80%, 50-90%, 50-95%, 50-100%, 60-70%, 60-80%, 60-90%, 60-95%, 60-100%, 70-80%, 70-90%, 70-95%, 70-100%, 80-90%, 80-95%, 80-100%, 90-95%, 90-100% or 95-100%. Accordingly, the protein product of the targeted gene may be inhibited by at least about 20%, preferably by at least about 30%, 40%, 41%, 42%, 43%, 44%, 45%, 46%, 47%, 48%, 49%, 50%, 51%, 52%, 53%, 54%, 55%, 56%, 57%, 58%, 59%, 60%, 70%, 71%, 72%, 73%, 74%, 75%, 76%, 77%, 78%, 79%, 80%, 81%, 82%, 83%, 84%, 85%, 90%, 95% and 100%, or at least 20-30%, 20-40%, 20-50%, 20-60%, 20-70%, 20-80%, 20-90%, 20-95%, 20-100%, 30-40%, 30-50%, 30-60%, 30-70%, 30-80%, 30-90%, 30-95%, 30-100%, 40-50%, 40-60%, 40-70%, 40-80%, 40-90%, 40-95%, 40-100%, 45-50%, 45-55%, 50-60%, 50-70%, 50-80%, 50-90%, 50-95%, 50-100%, 60-70%, 60-80%, 60-90%, 60-95%, 60-100%, 70-80%, 70-90%, 70-95%, 70-100%, 80-90%, 80-95%, 80-100%, 90-95%, 90-100% or 95-100%.

[0320] In one embodiment, the siRNA duplexes or encoded dsRNA of the present invention suppress (or degrade) the target mRNA in spinal cord motor neurons. In some aspects, the inhibition of the gene expression refers to an inhibition by at least about 20%, preferably by at least about 30%, 40%, 41%, 42%, 43%, 44%, 45%, 46%, 47%, 48%, 49%, 50%, 51%, 52%, 53%, 54%, 55%, 56%, 57%, 58%, 59%, 60%, 70%, 71%, 72%, 73%, 74%, 75%, 76%, 77%, 78%, 79%, 80%, 81%, 82%, 83%, 84%, 85%, 90%, 95% and 100%, or at least 20-30%, 20-40%, 20-50%, 20-60%, 20-70%, 20-80%, 20-90%, 20-95%, 20-100%, 30-40%, 30-50%, 30-60%, 30-70%, 30-80%, 30-90%, 30-95%, 30-100%, 40-50%, 40-60′%, 40-70′%, 40-80′%, 40-90%, 40-95%, 40-100%, 45-50%, 45-55%, 50-60%, 50-70%, 50-80%, 50-90%, 50-95%, 50-100%, 60-70%, 60-80%, 60-90%, 60-95,%, 60-100%, 70-80%, 70-90%, 70-95%, 70-100%, 80-90%, 80-95%, 80-100%, 90-95%, 90-100% or 95-100%. Accordingly, the protein product of the targeted gene may be inhibited by at least about 20%, preferably by at least about 30%, 40%, 41%, 42%, 43%, 44%, 45%, 46%, 47%, 48%, 49%, 50%, 51%, 52%, 53%, 54%, 55%, 56%, 57%, 58%, 59%, 60%, 70%, 71%, 72%, 73%, 74%, 75%, 76%, 77%, 78%, 79%, 80%, 81%, 82%, 83%, 84%, 85%, 90%, 95% and 100%, or at least 20-30%, 20-40%, 20-50%, 20-60%, 20-70%, 20-80%, 20-90%, 20-95%, 20-100%, 30-40%, 30-50%, 30-60%, 30-70%, 30-80%, 30-90%, 30-95%, 30-100%, 40-50%, 40-60%, 40-70%, 40-80%, 40-90%, 40-95%, 40-100%, 45-50%, 45-55%, 50-60%, 50-70%, 50-80%, 50-90%, 50-95%, 50-100%, 60-70%, 60-80%, 60-90%, 60-95%, 60-100%, 70-80%, 70-90%, 70-95%, 70-100%, 80-90%, 80-95%, 80-100%, 90-95%, 90-100% or 95-100%.

[0321] In one embodiment, the siRNA duplexes or encoded dsRNA of the present invention suppress (or degrade) the target mRNA in spinal cord motor neurons by 78%.

[0322] In one embodiment, the siRNA duplexes or encoded dsRNA of the present invention suppress (or degrade) the target mRNA in spinal cord motor neurons by 45-55%.

[0323] In one embodiment, the siRNA duplexes or encoded dsRNA of the present invention suppress (or degrade) the target mRNA in vg+ cells of motor neuron morphology. In some aspects, the inhibition of the gene expression refers to an inhibition by at least about 20%, preferably by at least about 30%, 40%, 41%, 42%, 43%, 44%, 45%, 46%, 47%, 48%, 49%, 50%, 51%, 52%, 53%, 54%, 55%, 56%, 57%, 58%, 59%, 60%, 70%, 71%, 72%, 73%, 74%, 75%, 76%, 77%, 78%, 79%, 80%, 81%, 82%, 83%, 84%, 85%, 90%, 95% and 100%, or at least 20-30%, 20-40%, 20-50%, 20-60%, 20-70%, 20-80%, 20-90%, 20-95%, 20-100%, 30-40%, 30-50%, 30-60%, 30-70%, 30-80%, 30-90%, 30-95%, 30-100%, 40-50%, 40-60%, 40-70%, 40-80%, 40-90%, 40-95%, 40-100%, 45-50%, 45-55%, 50-60%, 50-70%, 50-80%, 50-90%, 50-95%, 50-100%, 60-70%, 60-80%, 60-90%, 60-95%, 60-100%, 70-80%, 70-90%, 70-95%, 70-100%, 80-90%, 80-95%, 80-100%, 90-95%, 90-100% or 95-100%. Accordingly, the protein product of the targeted gene may be inhibited by at least about 20%, preferably by at least about 30%, 40%, 41%, 42%, 43%, 44%, 45%, 46%, 47%, 48%, 49%, 50%, 51%, 52%, 53%, 54%, 55%, 56%, 57%, 58%, 59%, 60%, 70%, 71%, 72%, 73%, 74%, 75%, 76%, 77%, 78%, 79%, 80%, 81%, 82%, 83%, 84%, 85&% 90%, 95% and 100%, or at least 20-30%, 20-40%, 20-50%, 20-60%, 20-70%, 20-80%, 20-90%, 20-95%, 20-100%, 30-40%, 30-50%, 30-60%, 30-70%, 30-80%, 30-90%, 30-95%, 30-100%, 40-50%, 40-60%, 40-70%, 40-80%, 40-90%, 40-95%, 40-100%, 45-50%, 45-55%, 50-60%, 50-70%, 50-80%, 50-90%, 50-95%, 50-100%, 60-70%, 60-80%, 60-90%, 60-95%, 60-100%, 70-80%, 70-90%, 70-95%, 70-100%, 80-90%, 80-95%, 80-100%, 90-95%, 90-100% or 95-100%.

[0324] In one embodiment, the siRNA duplexes or encoded dsRNA of the present invention suppress (or degrade) the target mRNA in vg+ cells of motor neuron morphology by 53%.

[0325] In one embodiment, the siRNA molecules comprise a miRNA seed match for the target located in the guide strand. In another embodiment, the siRNA molecules comprise a miRNA seed match for the target located in the passenger strand. In yet another embodiment, the siRNA duplexes or encoded dsRNA targeting the gene of interest do not comprise a seed match for the target located in the guide or passenger strand.

[0326] In one embodiment, the siRNA duplexes or encoded dsRNA targeting the gene of interest may have almost no significant full-length off target effects for the guide strand. In another embodiment, the siRNA duplexes or encoded dsRNA targeting the gene of interest may have almost no significant full-length off target effects for the passenger strand. The siRNA duplexes or encoded dsRNA targeting the gene of interest may have less than 1%, 2%, 3%, 4%, 5%, 6%, 7%, 8%, 9%, 10%,11%, 12%, 13%, 14%, 15%, 20%, 25%, 30%, 35%, 40%, 45%, 50%, 1-5%, 2-6%, 3-7%, 4-8%, 5-9%, 5-10%, 6-10%, 5-15%, 5-20%, 5-25% 5-30%, 10-20%, 10-30%, 10-40%, 10-50%, 15-30%, 15-40%, 15-45%, 20-40%, 20-50%, 25-50%, 30-40%, 30-50%, 35-50%, 40-50%, 45-50% full-length off target effects for the passenger strand. In yet another embodiment, the siRNA duplexes or encoded dsRNA targeting the gene of interest may have almost no significant full-length off target effects for the guide strand or the passenger strand. The siRNA duplexes or encoded dsRNA targeting the gene of interest may have less than 1%, 2%, 3%, 4%, 5%, 6%, 7%, 8%, 9%, 10%,11%, 12%, 13%, 14%, 15%, 20%, 25%, 30%, 35%, 40%, 45%, 50%, 1-5%, 2-6%, 3-7%, 4-8%, 5-9%, 5-10%, 6-10%, 5-15%, 5-20%, 5-25% 5-30%, 10-20%, 10-30%, 10-40%, 10-50%, 15-30%, 15-40%, 15-45%, 20-40%, 20-50%, 25-50%, 30-40%, 30-50%, 35-50%, 40-50%, 45-50% full-length off target effects for the guide or passenger strand.

[0327] In one embodiment, the siRNA duplexes or encoded dsRNA targeting the gene of interest may have high activity in vitro. In another embodiment, the siRNA molecules may have low activity in vitro. In yet another embodiment, the siRNA duplexes or dsRNA targeting the gene of interest may have high guide strand activity and low passenger strand activity in vitro.

[0328] In one embodiment, the siRNA molecules have a high guide strand activity and low passenger strand activity in vitro. The target knock-down (KD) by the guide strand may be at least 40%, 50%, 60%, 65%, 70%, 75%, 80%, 85%, 90%, 95%, 99%, 99.5% or 100%. The target knock-down by the guide strand may be 40-50%, 45-50%, 50-55%, 50-60%, 60-65%, 60-70%, 60-75%, 60-80%, 60-85%, 60-90%, 60-95%, 60-99%, 60-99.5%, 60-100%, 65-70%, 65-75%, 65-80%, 65-85%, 65-90%, 65-95%, 65-99%, 65-99.5%, 65-100%, 70-75%, 70-80%, 70-85%, 70-90%, 70-95%, 70-99%, 70-99.5%, 70-100%, 75-80%, 75-85%, 75-90%, 75-95%, 75-99%, 75-99.5%, 75-100%, 80-85%, 80-90%, 80-95%, 80-99%, 80-99.5%, 80-100%, 85-90%, 85-95%, 85-99%, 85-99.5%, 85-100%, 90-95%, 90-99%, 90-99.5%, 90-100%, 95-99%, 95-99.5%, 95-100%, 99-99.5%, 99-100% or 99.5-100%. As a non-limiting example, the target knock-down (KD) by the guide strand is greater than 70%. As a non-limiting example, the target knock-down (KD) by the guide strand is greater than 60%.

[0329] In one embodiment, the siRNA duplex is designed so there is no miRNA seed match for the sense or antisense sequence to the non-gene of interest sequence.

[0330] In one embodiment, the IC₅₀ of the guide strand for the nearest off target is greater than 100 multiplied by the IC₅₀ of the guide strand for the on-target gene. As a non-limiting example, if the IC₅₀ of the guide strand for the nearest off target is greater than 100 multiplied by the IC₅₀ of the guide strand for the target then the siRNA molecule is said to have high guide strand selectivity for inhibiting the gene of interest in vitro.

[0331] In one embodiment, the 5′ processing of the guide strand has a correct start (n) at the 5′ end at least 75%, 80%, 85%, 90%, 95%, 99% or 100% of the time in vitro or in vivo. As a non-limiting example, the 5′ processing of the guide strand is precise and has a correct start (n) at the 5′ end at least 99% of the time in vitro. As a non-limiting example, the 5′ processing of the guide strand is precise and has a correct start (n) at the 5′ end at least 99% of the time in vivo. As a non-limiting example, the 5′ processing of the guide strand is precise and has a correct start (n) at the 5′ end at least 90% of the time in vitro. As a non-limiting example, the 5′ processing of the guide strand is precise and has a correct start (n) at the 5′ end at least 90% of the time in vivo. As a non-limiting example, the 5′ processing of the guide strand is precise and has a correct start (n) at the 5′ end at least 85% of the time in vitro. As a non-limiting example, the 5′ processing of the guide strand is precise and has a correct start (n) at the 5′ end at least 85% of the time in vivo.

[0332] In one embodiment, the guide to passenger (G:P) (also referred to as the antisense to sense) strand ratio expressed is 1:10, 1:9, 1:8, 1:7, 1:6, 1:5, 1:4, 1:3, 1:2, 1:1, 2:10, 2:9, 2:8, 2:7, 2:6, 2:5, 2:4, 2:3, 2:2, 2:1, 3:10, 3:9, 3:8, 3:7, 3:6, 3:5, 3:4, 3:3, 3:2, 3:1, 4:10, 4:9, 4:8, 4:7, 4:6, 4:5, 4:4, 4:3, 4:2, 4:1, 5:10, 5:9, 5:8, 5:7, 5:6, 5:5, 5:4, 5:3, 5:2, 5:1, 6:10, 6:9, 6:8, 6:7, 6:6, 6:5, 6:4, 6:3, 6:2, 6:1, 7:10, 7:9, 7:8, 7:7, 7:6, 7:5, 7:4, 7:3, 7:2, 7:1, 8:10, 8:9, 8:8, 8:7, 8:6, 8:5, 8:4, 8:3, 8:2, 8:1, 9:10, 9:9, 9:8, 9:7, 9:6, 9:5, 9:4, 9:3, 9:2, 9:1, 10:10, 10:9, 10:8, 10:7, 10:6, 10:5, 10:4, 10:3, 10:2, 10:1, 1:99, 5:95, 10:90, 15:85, 20:80, 25:75, 30:70, 35:65, 40:60, 45:55, 50:50, 55:45, 60:40, 65:35, 70:30, 75:25, 80:20, 85:15, 90:10, 95:5, or 99:1 in vitro or in vivo. The guide to passenger ratio refers to the ratio of the guide strands to the passenger strands after intracellular processing of the pri-microRNA. For example, a 80:20 guide-to-passenger ratio would have 8 guide strands to every 2 passenger strands processed from the precursor. As a non-limiting example, the guide-to-passenger strand ratio is 8:2 in vitro. As a non-limiting example, the guide-to-passenger strand ratio is 8:2 in vivo. As a non-limiting example, the guide-to-passenger strand ratio is 9:1 in vitro. As a non-limiting example, the guide-to-passenger strand ratio is 9:1 in vivo.

[0333] In one embodiment, the guide to passenger (G:P) strand ratio is in a range of 1-99, 1,3-99, 5-99, 10-99, 15-99, 20-99, 25-99, 30-99, 35-99, 40-99, 45-99, 50-99, 55-99, 60-99, 65-99, 70-99, 75-99, 80-99, 85-99, 90-99, 95-99, 1-10, 1-15, 1-20, 1-25, 1-30, 1-35, 1-40, 1-45, 1-50, 1-55, 1-60, 1-65, 1-70, 1-75, 1-80, 1-85, 1-90, 1-95, 5-10, 5-15, 5-20, 5-25, 5-30, 5-35, 5-40, 5-45, 5-50, 5-55, 5-60, 5-65, 5-70, 5-75, 5-80, 5-85, 5-90, 5-95, 10-15, 10-20, 10-25, 10-30, 10-35, 10-40, 10-45, 10-50, 10-55, 10-60, 10-65, 10-70, 10-75, 10-80, 10-85, 10-90, 10-95, 15-20, 15-25, 15-30, 15-35, 15-40, 15-45, 15-50, 15-55, 15-60, 15-65, 15-70, 15-75, 15-80, 15-85, 15-90, 15-95, 20-25, 20-30, 20-35, 20-40, 20-45, 20-50, 20-55, 20-60, 20-65, 20-70, 20-75, 20-80, 20-85, 20-90, 20-95, 25-30, 25-35, 25-40, 25-45, 25-50, 25-55, 25-60, 25-65, 25-70, 25-75, 25-80, 25-85, 25-90, 25-95, 30-35, 30-40, 30-45, 30-50, 30-55, 30-60, 30-65, 30-70, 30-75, 30-80, 30-85, 30-90, 30-95, 35-40, 35-45, 35-50, 35-55, 35-60, 35-65, 35-70, 35-75, 35-80, 35-85, 35-90, 35-95, 40-45, 40-50, 40-55, 40-60, 40-65, 40-70, 40-75, 40-80, 40-85, 40-90, 40-95, 45-50, 45-55, 45-60, 45-65, 45-70, 45-75, 45-80, 45-85, 45-90, 45-95, 50-55, 50-60, 50-65, 50-70, 50-75, 50-80, 50-85, 50-90, 50-95, 55-60, 55-65, 55-70, 55-75, 55-80, 55-85, 55-90, 55-95, 60-65, 60-70, 60-75, 60-80, 60-85, 60-90, 60-95, 65-70, 65-75, 65-80, 65-85, 65-90, 65-95, 70-75, 70-80, 70-85, 70-90, 70-95, 75-80, 75-85, 75-90, 75-95, 80-85, 80-90, 80-95, 85-90, 85-95, or 90-95. As a non-limiting example, the guide to passenger ratio is a range of 1.3 to 99. As a non-limiting example, the guide to passenger ratio is a range of 10 to 99.

[0334] In one embodiment, the guide to passenger (G:P) strand ratio is 10, 10.5, 11, 11.5, 12, 12.5, 13, 13.5, 14, 14.5, 15, 15.5, 16, 16.5, 17, 17.5, 18, 18.5, 19, 19.5, 20, 20.5, 21, 21.5, 22, 22.5, 23, 23.5, 24, 24.5, 25, 25.5, 26, 26.5, 27, 27.5, 28, 28.5, 29, 29.5, 30, 30.5, 31, 31.5, 32, 32.5, 33, 33.5, 34, 34.5, 35, 35.5, 36, 36.5, 37, 37.5, 38, 38.5, 39, 39.5, 40, 40.5, 41, 41.5, 42, 42.5, 43, 43.5, 44, 44.5, 45, 45.5, 46, 46.5, 47, 47.5, 48, 48.5, 49, 49.5, 50, 50.5, 51, 51.5, 52, 52.5, 53, 53.5, 54, 54.5, 55, 55.5, 56, 56.5, 57, 57.5, 58, 58.5, 59, 59.5, 60, 60.5, 61, 61.5, 62, 62.5, 63, 63.5, 64, 64.5, 65, 65.5, 66, 66.5, 67, 67.5, 68, 68.5, 69, 69.5, 70, 70.5, 71, 71.5, 72, 72.5, 73, 73.5, 74, 74.5, 75, 75.5, 76, 76.5, 77, 77.5, 78, 78.5, 79, 79.5, 80, 80.5, 81, 81.5, 82, 82.5, 83, 83.5, 84, 84.5, 85, 85.5, 86, 86.5, 87, 87.5, 88, 88.5, 89, 89.5, 90, 90.5, 91, 91.5, 92, 92.5, 93, 93.5, 94, 94.5, 95, 95.5, 96, 96.5, 97, 97.5, 98, 98.5, or 99. As a non-limiting example, the guide to passenger (G:P) strand ratio is 11.5. As a non-limiting example, the guide to passenger (G:P) strand ratio is 99.

[0335] In one embodiment, the guide to passenger (G:P) (also referred to as the antisense to sense) strand ratio expressed is greater than 1.

[0336] In one embodiment, the guide to passenger (G:P) (also referred to as the antisense to sense) strand ratio expressed is greater than 2.

[0337] In one embodiment, the guide to passenger (G:P) (also referred to as the antisense to sense) strand ratio expressed is greater than 5.

[0338] In one embodiment, the guide to passenger (G:P) (also referred to as the antisense to sense) strand ratio expressed is greater than 10.

[0339] In one embodiment, the guide to passenger (G:P) (also referred to as the antisense to sense) strand ratio expressed is greater than 20.

[0340] In one embodiment, the guide to passenger (G:P) (also referred to as the antisense to sense) strand ratio expressed is greater than 50.

[0341] In one embodiment, the guide to passenger (G:P) (also referred to as the antisense to sense) strand ratio expressed is at least 3:1.

[0342] In one embodiment, the guide to passenger (G:P) (also referred to as the antisense to sense) strand ratio expressed is at least 5:1.

[0343] In one embodiment, the guide to passenger (G:P) (also referred to as the antisense to sense) strand ratio expressed is at least 10:1.

[0344] 1 In one embodiment, the guide to passenger (G:P) (also referred to as the antisense to sense) strand ratio expressed is at least 20:1.

[0345] In one embodiment, the guide to passenger (G:P) (also referred to as the antisense to sense) strand ratio expressed is at least 50:1.

[0346] In one embodiment, the passenger to guide (P:G) (also referred to as the sense to antisense) strand ratio expressed is 1:10, 1:9, 1:8, 1:7, 1:6, 1:5, 1:4, 1:3, 1:2, 1:1, 2:10, 2:9, 2:8, 2:7, 2:6, 2:5, 2:4, 2:3, 2:2, 2:1, 3:10, 3:9, 3:8, 3:7, 3:6, 3:5, 3:4, 3:3, 3:2, 3:1, 4:10, 4:9, 4:8, 4:7, 4:6, 4:5, 4:4, 4:3, 4:2, 4:1, 5:10, 5:9, 5:8, 5:7, 5:6, 5:5, 5:4, 5:3, 5:2, 5:1, 6:10, 6:9, 6:8, 6:7, 6:6, 6:5, 6:4, 6:3, 6:2, 6:1, 7:10, 7:9, 7:8, 7:7, 7:6, 7:5, 7:4, 7:3, 7:2, 7:1, 8:10, 8:9, 8:8, 8:7, 8:6, 8:5, 8:4, 8:3, 8:2, 8:1, 9:10, 9:9, 9:8, 9:7, 9:6, 9:5, 9:4, 9:3, 9:2, 9:1, 10:10, 10:9, 10:8, 10:7, 10:6, 10:5, 10:4, 10:3, 10:2, 10:1, 1:99, 5:95, 10:90, 15:85, 20:80, 25:75, 30:70, 35:65, 40:60, 45:55, 50:50, 55:45, 60:40, 65:35, 70:30, 75:25, 80:20, 85:15, 90:10, 95:5, or 99:1 in vitro or in vivo. The passenger to guide ratio refers to the ratio of the passenger strands to the guide strands after the intracellular processing of the pri-microRNA. For example, a 80:20 of passenger-to-guide ratio would have 8 passenger strands to every 2 guide strands processed from the precursor. As a non-limiting example, the passenger-to-guide strand ratio is 80:20 in vitro. As a non-limiting example, the passenger-to-guide strand ratio is 80:20 in vivo. As a non-limiting example, the passenger-to-guide strand ratio is 8:2 in vitro. As a non-limiting example, the passenger-to-guide strand ratio is 8:2 in vivo. As a non-limiting example, the passenger-to-guide strand ratio is 9:1 in vitro. As a non-limiting example, the passenger-to-guide strand ratio is 9:1 in vivo.

[0347] In one embodiment, the passenger to guide (P:G) strand ratio is in a range of 1-99, 1.3-99, 5-99, 10-99, 15-99, 20-99, 25-99, 30-99, 35-99, 40-99, 45-99, 50-99, 55-99, 60-99, 65-99, 70-99, 75-99, 80-99, 85-99, 90-99, 95-99, 1-10, 1-15, 1-20, 1-25, 1-30, 1-35, 1-40, 1-45, 1-50, 1-55, 1-60, 1-65, 1-70, 1-75, 1-80, 1-85, 1-90, 1-95, 5-10, 5-15, 5-20, 5-25, 5-30, 5-35, 5-40, 5-45, 5-50, 5-55, 5-60, 5-65, 5-70, 5-75, 5-80, 5-85, 5-90, 5-95, 10-15, 10-20, 10-25, 10-30, 10-35, 10-40, 10-45, 10-50, 10-55, 10-60, 10-65, 10-70, 10-75, 10-80, 10-85, 10-90, 10-95, 15-20, 15-25, 15-30, 15-35, 15-40, 15-45, 15-50, 15-55, 15-60, 15-65, 15-70, 15-75, 15-80, 15-85, 15-90, 15-95, 20-25, 20-30, 20-35, 20-40, 20-45, 20-50, 20-55, 20-60, 20-65, 20-70, 20-75, 20-80, 20-85, 20-90, 20-95, 25-30, 25-35, 25-40, 25-45, 25-50, 25-55, 25-60, 25-65, 25-70, 25-75, 25-80, 25-85, 25-90, 25-95, 30-35, 30-40, 30-45, 30-50, 30-55, 30-60, 30-65, 30-70, 30-75, 30-80, 30-85, 30-90, 30-95, 35-40, 35-45, 35-50, 35-55, 35-60, 35-65, 35-70, 35-75, 35-80, 35-85, 35-90, 35-95, 40-45, 40-50, 40-55, 40-60, 40-65, 40-70, 40-75, 40-80, 40-85, 40-90, 40-95, 45-50, 45-55, 45-60, 45-65, 45-70, 45-75, 45-80, 45-85, 45-90, 45-95, 50-55, 50-60, 50-65, 50-70, 50-75, 50-80, 50-85, 50-90, 50-95, 55-60, 55-65, 55-70, 55-75, 55-80, 55-85, 55-90, 55-95, 60-65, 60-70, 60-75, 60-80, 60-85, 60-90, 60-95, 65-70, 65-75, 65-80, 65-85, 65-90, 65-95, 70-75, 70-80, 70-85, 70-90, 70-95, 75-80, 75-85, 75-90, 75-95, 80-85, 80-90, 80-95, 85-90, 85-95, or 90-95.

[0348] In one embodiment, the passenger to guide (P:G) strand ratio is 10, 10.5, 11, 11.5, 12, 12.5, 13, 13.5, 14, 14.5, 15, 15.5, 16, 16.5, 17, 17.5, 18, 18.5, 19, 19.5, 20, 20.5, 21, 21.5, 22, 22.5, 23, 23.5, 24, 24.5, 25, 25.5, 26, 26.5, 27, 27.5, 28, 28.5, 29, 29.5, 30, 30.5, 31, 31.5, 32, 32.5, 33, 33.5, 34, 34.5, 35, 35.5, 36, 36.5, 37, 37.5, 38, 38.5, 39, 39.5, 40, 40.5, 41, 41.5, 42, 42.5, 43, 43.5, 44, 44.5, 45, 45.5, 46, 46.5, 47, 47.5, 48, 48.5, 49, 49.5, 50, 50.5, 51, 51.5, 52, 52.5, 53, 53.5, 54, 54.5, 55, 55.5, 56, 56.5, 57, 57.5, 58, 58.5, 59, 59.5, 60, 60.5, 61, 61.5, 62, 62.5, 63, 63.5, 64, 64.5, 65, 65.5, 66, 66.5, 67, 67.5, 68, 68.5, 69, 69.5, 70, 70.5, 71, 71.5, 72, 72.5, 73, 73.5, 74, 74.5, 75, 75.5, 76, 76.5, 77, 77.5, 78, 78.5, 79, 79.5, 80, 80.5, 81, 81.5, 82, 82.5, 83, 83.5, 84, 84.5, 85, 85.5, 86, 86.5, 87, 87.5, 88, 88.5, 89, 89.5, 90, 90.5, 91, 91.5, 92, 92.5, 93, 93.5, 94, 94.5, 95, 95.5, 96, 96.5, 97, 97.5, 98, 98.5, or 99.

[0349] In one embodiment, the passenger to guide (P:G) (also referred to as the sense to antisense) strand ratio expressed is greater than 1.

[0350] In one embodiment, the passenger to guide (P:G) (also referred to as the sense to antisense) strand ratio expressed is greater than 2.

[0351] In one embodiment, the passenger to guide (P:G) (also referred to as the sense to antisense) strand ratio expressed is greater than 5.

[0352] In one embodiment, the passenger to guide (P:G) (also referred to as the sense to antisense) strand ratio expressed is greater than 10.

[0353] In one embodiment, the passenger to guide (P:G) (also referred to as the sense to antisense) strand ratio expressed is greater than 20.

[0354] In one embodiment, the passenger to guide (P:G) (also referred to as the sense to antisense) strand ratio expressed is greater than 50.

[0355] In one embodiment, the passenger to guide (P:G) (also referred to as the sense to antisense) strand ratio expressed is at least 3:1.

[0356] In one embodiment, the passenger to guide (P:G) (also referred to as the sense to antisense) strand ratio expressed is at least 5:1.

[0357] In one embodiment, the passenger to guide (P:G) (also referred to as the sense to antisense) strand ratio expressed is at least 10:1.

[0358] In one embodiment, the passenger to guide (P:G) (also referred to as the sense to antisense) strand ratio expressed is at least 20:1.

[0359] In one embodiment, the passenger to guide (P:G) (also referred to as the sense to antisense) strand ratio expressed is at least 50:1.

[0360] In one embodiment, a passenger-guide strand duplex is considered effective when the pri- or pre-microRNAs demonstrate, but methods known in the art and described herein, greater than 2-fold guide to passenger strand ratio when processing is measured. As a non-limiting examples, the pri- or pre-microRNAs demonstrate great than 2-fold, 3-fold, 4-fold, 5-fold, 6-fold, 7-fold, 8-fold, 9-fold, 10-fold, 11-fold, 12-fold, 13-fold, 14-fold, 15-fold, or 2 to 5-fold, 2 to 10-fold, 2 to 15-fold, 3 to 5-fold, 3 to 10-fold, 3 to 15-fold, 4 to 5-fold, 4 to 10-fold, 4 to 15-fold, 5 to 10-fold, 5 to 15-fold, 6 to 10-fold, 6 to 15-fold, 7 to 10-fold, 7 to 15-fold, 8 to 10-fold, 8 to 15-fold, 9 to 10-fold, 9 to 15-fold, 10 to 15-fold, 11 to 15-fold, 12 to 15-fold, 13 to 15-fold, or 14 to 15-fold guide to passenger strand ratio when processing is measured.

[0361] In one embodiment, the vector genome encoding the dsRNA comprises a sequence which is at least 60%, 65%, 70%, 75%, 80%, 85%, 90%, 95%, 99% or more than 99% of the full length of the construct. As a non-limiting example, the vector genome comprises a sequence which is at least 80% of the full length sequence of the construct.

[0362] In one embodiment, the siRNA molecules may be used to silence wild type or mutant version of the gene of interest by targeting at least one exon on the gene of interest sequence. The exon may be exon 1, exon 2, exon 3, exon 4, exon 5, exon 6, exon 7, exon 8, exon 9, exon 10, exon 11, exon 12, exon 13, exon 14, exon 15, exon 16, exon 17, exon 18, exon 19, exon 20, exon 21, exon 22, exon 23, exon 24, exon 25, exon 26, exon 27, exon 28, exon 29, exon 30, exon 31, exon 32, exon 33, exon 34, exon 35, exon 36, exon 37, exon 38, exon 39, exon 40, exon 41, exon 42, exon 43, exon 44, exon 45, exon 46, exon 47, exon 48, exon 49, exon 50, exon 51, exon 52, exon 53, exon 54, exon 55, exon 56, exon 57, exon 58, exon 59, exon 60, exon 61, exon 62, exon 63, exon 64, exon 65, exon 66, and/or exon 67.

Design and Sequences of siRNA Duplexes Targeting SOD1 Gene

[0363] The present invention provides small interfering RNA (siRNA) duplexes (and modulatory polynucleotides encoding them) that target SOD1 mRNA to interfere with SOD1 gene expression and/or SOD1 protein production.

[0364] The encoded siRNA duplex of the present invention contains an antisense strand and a sense strand hybridized together forming a duplex structure, wherein the antisense strand is complementary to the nucleic acid sequence of the targeted SOD1 gene, and wherein the sense strand is homologous to the nucleic acid sequence of the targeted SOD1 gene. In some aspects, the 5′end of the antisense strand has a 5′ phosphate group and the 3′end of the sense strand contains a 3′hydroxyl group. In other aspects, there are none, one or 2 nucleotide overhangs at the 3′end of each strand.

[0365] Some guidelines for designing siRNAs have been proposed in the art. These guidelines generally recommend generating a 19-nucleotide duplexed region, symmetric 2-3 nucleotide 3′overhangs, 5′-phosphate and 3′-hydroxyl groups targeting a region in the gene to be silenced. Other rules that may govern siRNA sequence preference include, but are not limited to, (i) A/U at the 5′ end of the antisense strand; (ii) G/C at the 5′ end of the sense strand; (iii) at least five A/U residues in the 5′ terminal one-third of the antisense strand; and (iv) the absence of any GC stretch of more than 9 nucleotides in length. In accordance with such consideration, together with the specific sequence of a target gene, highly effective siRNA molecules essential for suppressing the SOD1 gene expression may be readily designed.

[0366] According to the present invention, siRNA molecules (e.g., siRNA duplexes or encoded dsRNA) that target the SOD1 gene are designed. Such siRNA molecules can specifically, suppress SOD1 gene expression and protein production. In some aspects, the siRNA molecules are designed and used to selectively “knock out” SOD1 gene variants in cells. i.e., mutated SOD1 transcripts that are identified in patients with ALS disease. In some aspects, the siRNA molecules are designed and used to selectively “knock down” SOD1 gene variants in cells. In other aspects, the siRNA molecules are able to inhibit or suppress both the wild type and mutated SOD1 gene.

[0367] In one embodiment, an siRNA molecule of the present invention comprises a sense strand and a complementary antisense strand in which both strands are hybridized together to form a duplex structure. The antisense strand has sufficient complementarity to the SOD1 mRNA sequence to direct target-specific RNAi, i.e., the siRNA molecule has a sequence sufficient to trigger the destruction of the target mRNA by the RNAi machinery or process.

[0368] In one embodiment, an siRNA molecule of the present invention comprises a sense strand and a complementary antisense strand in which both strands are hybridized together to form a duplex structure and where the start site of the hybridization to the SOD1 mRNA is between nucleotide 15 and 1000 on the SOD1 mRNA sequence. As a non-limiting example, the start site may be between nucleotide 15-25, 15-50, 15-75, 15-100, 100-150, 150-200, 200-250, 250-300, 300-350, 350-400, 400-450, 450-500, 500-550, 550-600, 600-650, 650-700, 700-70, 750-800, 800-850, 850-900, 900-950, and 950-1000 on the SOD1 mRNA sequence. As yet another non-limiting example, the start site may be nucleotide 26, 27, 28, 29, 30, 32, 33, 34, 35, 36, 37, 74, 76, 77, 78, 149, 153, 157, 160, 177, 192, 193, 195, 196, 197, 198, 199, 206, 209, 210, 239, 241, 261, 263, 264, 268, 269, 276, 278, 281, 284, 290, 291, 295, 296, 316, 317, 329, 330, 337, 350, 351, 352, 354, 357, 358, 364, 375, 378, 383, 384, 390, 392, 395, 404, 406, 417, 418, 469, 470, 475, 476, 480, 487, 494, 496, 497, 501, 504, 515, 518, 522, 523, 524, 552, 554, 555, 562, 576, 577, 578, 579, 581, 583, 584, 585, 587, 588, 589, 593, 594, 595, 596, 597, 598, 599, 602, 607, 608, 609, 610, 611, 612, 613, 616, 621, 633, 635, 636, 639, 640, 641, 642, 643, 644, 645, 654, 660, 661, 666, 667, 668, 669, 673, 677, 692, 698, 699, 700, 701, 706, 749, 770, 772, 775, 781, 800, 804, 819, 829, 832, 833, 851, 854, 855, 857, 858, 859, 861, 869, 891, 892, 906, 907, 912, 913, 934, 944, and 947 on the SOD1 mRNA sequence.

[0369] In some embodiments, the antisense strand and target SOD1 mRNA sequences have 100% complementarity. The antisense strand may be complementary to any part of the target SOD1 mRNA sequence.

[0370] In other embodiments, the antisense strand and target SOD1 mRNA sequences comprise at least one mismatch. As a non-limiting example, the antisense strand and the target SOD1 mRNA sequence have at least 30%, 40%, 50%, 60%, 70%, 80%, 81%, 82%, 83%, 84%, 85%, 86%, 87%, 88%, 89%, %90%, 91%, 92%, 93%, 94%, 95%, 96%, 97%, 98% or 99% or at least 20-30%, 20-40%, 20-50%, 20-60%, 20-70%, 20-80%, 20-90%, 20-95%, 20-99%, 30-40%, 30-50%, 30-60%, 30-70%, 30-80%, 30-90%, 30-95%, 30-99%, 40-50%, 40-60%, 40-70%, 40-80%, 40-90%, 40-95%, 40-99%, 50-60%, 50-70%, 50-80%, 50-90%, 50-95%, 50-99%, 60-70%, 60-80%, 60-90%, 60-95%, 60-99%, 70-80%, 70-90%, 70-95%, 70-99%, 80-90%, 80-95%, 80-99%, 90-95%, 90-99% or 95-99% complementarity.

[0371] In one embodiment, an siRNA or dsRNA targeting SOD1 includes at least two sequences that are complementary to each other.

[0372] According to the present invention, the siRNA molecule targeting SOD1 has a length from about 10-50 or more nucleotides, i.e., each strand comprising 10-50 nucleotides (or nucleotide analogs). Preferably, the siRNA molecule has a length from about 15-30, e.g., 15, 16, 17, 18, 19, 20, 21, 22, 23, 24, 25, 26, 27, 28, 29, or 30 nucleotides in each strand, wherein one of the strands is sufficiently complementarity to a target region. In one embodiment, each strand of the siRNA molecule has a length from about 19 to 25, 19 to 24 or 19 to 21 nucleotides. In one embodiment, at least one strand of the siRNA molecule is 19 nucleotides in length. In one embodiment, at least one strand of the siRNA molecule is 20 nucleotides in length. In one embodiment, at least one strand of the siRNA molecule is 21 nucleotides in length. In one embodiment, at least one strand of the siRNA molecule is 22 nucleotides in length. In one embodiment, at least one strand of the siRNA molecule is 23 nucleotides in length. In one embodiment, at least one strand of the siRNA molecule is 24 nucleotides in length. In one embodiment, at least one strand of the siRNA molecule is 25 nucleotides in length.

[0373] In some embodiments, the siRNA molecules of the present invention targeting SOD1 can be synthetic RNA duplexes comprising about 19 nucleotides to about 25 nucleotides, and two overhanging nucleotides at the 3′-end. In some aspects, the siRNA molecules may be unmodified RNA molecules. In other aspects, the siRNA molecules may contain at least one modified nucleotide, such as base, sugar or backbone modifications.

[0374] In one embodiment, the siRNA molecules of the present invention targeting SOD1 may comprise a nucleotide sequence such as, but not limited to, the antisense (guide) sequences in Table 2 or a fragment or variant thereof. As a non-limiting example, the antisense sequence used in the siRNA molecule of the present invention is at least 30%, 40%, 50%, 60%, 70%, 80%, 81%, 82%, 83%, 84%, 85%, 86%, 87%, 88%, 89%, 90%, 91%, 92%, 93%, 94%, 95%, 96%, 97%, 98% or 99% or at least 20-30%, 20-40%, 20-50%, 20-60%, 20-70%, 20-80%, 20-90%, 20-95%, 20-99%, 30-40%, 30-50%, 30-60%, 30-70%, 30-80%, 30-90%, 30-95%, 30-99%, 40-50%, 40-60%, 40-70%, 40-80%, 40-90%, 40-95%, 40-99%, 50-60%, 50-70%, 50-80%, 50-90%, 50-95%, 50-99%, 60-70%, 60-80%, 60-90%, 60-95%, 60-99%, 70-80%, 70-90%, 70-95%, 70-99%, 80-90%, 80-95%, 80-99%, 90-95%, 90-99% or 95-99% of a nucleotide sequence in Table 2. As another non-limiting example, the antisense sequence used in the siRNA molecule of the present invention comprises at least 3, 4, 5, 6, 7, 8, 9, 10, 11, 12, 13, 14, 15, 16, 17, 18, 19, 20, 21 or more than 21 consecutive nucleotides of a nucleotide sequence in Table 2. As yet another non-limiting example, the antisense sequence used in the siRNA molecule of the present invention comprises nucleotides 1 to 22, 1 to 21, 1 to 20, 1 to 19, 1 to 18, 1 to 17, 1 to 16, 1 to 15, 1 to 14, 1 to 13, 1 to 12, 1 to 11, 1 to 10, 1 to 9, 1 to 8, 2 to 22, 2 to 21, 2 to 20, 2 to 19, 2 to 18, 2 to 17, 2 to 16, 2 to 15, 2 to 14, 2 to 13, 2 to 12, 2 to 11, 2 to 10, 2 to 9, 2 to 8, 3 to 22, 3 to 21, 3 to 20, 3 to 19, 3 to 18, 3 to 17, 3 to 16, 3 to 15, 3 to 14, 3 to 13, 3 to 12, 3 to 11, 3 to 10, 3 to 9, 3 to 8, 4 to 22, 4 to 21, 4 to 20, 4 to 19, 4 to 18, 4 to 17, 4 to 16, 4 to 15, 4 to 14, 4 to 13, 4 to 12, 4 to 11, 4 to 10, 4 to 9, 4 to 8, 5 to 22, 5 to 21, 5 to 20, 5 to 19, 5 to 18, 5 to 17, 5 to 16, 5 to 15, 5 to 14, 5 to 13, 5 to 12, 5 to 1, 5 to 10, 5 to 9, 5 to 8, 6 to 22, 6 to 21, 6 to 20, 6 to 19, 6 to 18, 6 to 17, 6 to 16, 6 to 15, 6 to 14, 6 to 13, 6 to 12, 6 to 11, 6 to 10, 7 to 22, 7 to 21, 7 to 20, 7 to 19, 7 to 18, 7 to 17, 7 to 16, 7 to 15, 7 to 14, 7 to 13, 7 to 12, 8 to 22, 8 to 21, 8 to 20, 8 to 19, 8 to 18, 8 to 17, 8 to 16, 8 to 15, 8 to 14, 8 to 13, 8 to 12, 9 to 22, 9 to 21, 9 to 20, 9 to 19, 9 to 18, 9 to 17, 9 to 16, 9 to 15, 9 to 14, 10 to 22, 10 to 21, 10 to 20, 10 to 19, 10 to 18, 10 to 17, 10 to 16, 10 to 15, 10 to 14, 11 to 22, 11 to 21, 11 to 20, 11 to 19, 11 to 18, 11 to 17, 11 to 16, 11 to 15, 11 to 14, 12 to 22, 12 to 21, 12 to 20, 12 to 19, 12 wt 18, 12 to 17, 12 to 16, 13 to 22, 13 to 21, 13 to 20, 13 to 19, 13 to 18, 13 to 17, 13 to 16, 14 to 22, 14 to 21, 14 to 20, 14 to 19, 14 to 18, 14 to 17, 15 to 22, 15 to 21, 15 to 20, 15 to 19, 15 to 18, 16 to 22, 16 to 21, 16 to 20, 17 to 22, 17 to 21, or 18 to 22 of the sequences in Table 2.

TABLE 2
Antisense Sequences

| | | SEQ |
|---|---|---|
| Antisense | | ID |
| ID | Sequence | NO |
| A-3000 | UUUAUAGGCCAGACCUCCGdTdT | 916 |
| A-3001 | UUUUAUAGGCCAGACCUCCdTdT | 917 |
| A-3002 | UCUUUAUAGGCCAGACCUCdTdT | 918 |
| A-3003 | UACUUUAUAGGCCAGACCUdTdT | 919 |
| A-3004 | UUACUUUAUAGGCCAGACCdTdT | 920 |
| A-3005 | UACUACUUUAUAGGCCAGAdTdT | 921 |
| A-3006 | UGACUACUUUAUAGGCCAGdTdT | 922 |
| A-3007 | UCGACUACUUUAUAGGCCAdTdT | 923 |
| A-3008 | UGCGACUACUUUAUAGGCCdTdT | 924 |
| A-3009 | UCGCGACUACUUUAUAGGCdTdT | 925 |
| A-3010 | UCCGCGACUACUUUAUAGGdTdT | 926 |
| A-3011 | UGCUGCAGGAGACUACGACdTdT | 927 |
| A-3012 | UACGCUGCAGGAGACUACGdTdT | 928 |
| A-3013 | UGACGCUGCAGGAGACUACdTdT | 929 |
| A-3014 | UAGACGCUGCAGGAGACUAdTdT | 930 |
| A-3015 | UCACGGCCUUCGUCGCCAUdTdT | 931 |
| A-3016 | UCGCACACGGCCUUCGUCGdTdT | 932 |
| A-3017 | UAGCACGCACACGGCCUUCdTdT | 933 |
| A-3018 | UUUCAGCACGCACACGGCCdTdT | 934 |
| A-3019 | UGCACUGGGCCGUCGCCCUdTdT | 935 |
| A-3020 | UAAUUGAUGAUGCCCUGCAdTdT | 936 |
| A-3021 | UAAAUUGAUGAUGCCCUGCdTdT | 937 |
| A-3022 | UCGAAAUUGAUGAUGCCCUdTdT | 938 |
| A-3023 | UUCGAAAUUGAUGAUGCCCdTdT | 939 |
| A-3024 | UCUCGAAAUUGAUGAUGCCdTdT | 940 |
| A-3025 | UGCUCGAAAUUGAUGAUGCdTdT | 941 |
| A-3026 | UUGCUCGAAAUUGAUGAUGdTdT | 942 |
| A-3027 | UUUCCUUCUGCUCGAAAUUdTdT | 943 |
| A-3028 | UACUUUCCUUCUGCUCGAAdTdT | 944 |
| A-3029 | UUACUUUCCUUCUGCUCGAdTdT | 945 |
| A-3030 | UAAUGCUUCCCCACACCUUdTdT | 946 |
| A-3031 | UUUAAUGCUUCCCCACACCdTdT | 947 |
| A-3032 | UGCAGGCCUUCAGUCAGUCdTdT | 948 |
| A-3033 | UAUGCAGGCCUUCAGUCAGdTdT | 949 |
| A-3034 | UCAUGCAGGCCUUCAGUCAdTdT | 950 |
| A-3035 | UAAUCCAUGCAGGCCUUCAdTdT | 951 |
| A-3036 | UGAAUCCAUGCAGGCCUUCdTdT | 952 |
| A-3037 | UGAACAUGGAAUCCAUGCAdTdT | 953 |
| A-3038 | UAUGAACAUGGAAUCCAUGdTdT | 954 |
| A-3039 | UCUCAUGAACAUGGAAUCCdTdT | 955 |
| A-3040 | UAAACUCAUGAACAUGGAAdTdT | 956 |
| A-3041 | UAUCUCCAAACUCAUGAACdTdT | 957 |
| A-3042 | UUAUCUCCAAACUCAUGAAdTdT | 958 |
| A-3043 | UGUAUUAUCUCCAAACUCAdTdT | 959 |
| A-3044 | UUGUAUUAUCUCCAAACUCdTdT | 960 |
| A-3045 | UCCUGCACUGGUACAGCCUdTdT | 961 |
| A-3046 | UACCUGCACUGGUACAGCCdTdT | 962 |
| A-3047 | UAUUAAAGUGAGGACCUGCdTdT | 963 |
| A-3048 | UGAUUAAAGUGAGGACCUGdTdT | 964 |
| A-3049 | UGAUAGAGGAUUAAAGUGAdTdT | 965 |
| A-3050 | UACCGUGUUUUCUGGAUAGdTdT | 966 |
| A-3051 | UCACCGUGUUUUCUGGAUAdTdT | 967 |
| A-3052 | UCCACCGUGUUUUCUGGAUdTdT | 968 |
| A-3053 | UGCCCACCGUGUUUUCUGGdTdT | 969 |
| A-3054 | UUUGGCCCACCGUGUUUUCdTdT | 970 |
| A-3055 | UUUUGGCCCACCGUGUUUUdTdT | 971 |
| A-3056 | UUCAUCCUUUGGCCCACCGdTdT | 972 |
| A-3057 | UCAUGCCUCUCUUCAUCCUdTdT | 973 |
| A-3058 | UCAACAUGCCUCUCUUCAUdTdT | 974 |
| A-3059 | UGUCUCCAACAUGCCUCUCdTdT | 975 |
| A-3060 | UAGUCUCCAACAUGCCUCUdTdT | 976 |
| A-3061 | UUGCCCAAGUCUCCAACAUdTdT | 977 |
| A-3062 | UAUUGCCCAAGUCUCCAACdTdT | 978 |
| A-3063 | UCACAUUGCCCAAGUCUCCdTdT | 979 |
| A-3064 | UGUCAGCAGUCACAUUGCCdTdT | 980 |
| A-3065 | UUUGUCAGCAGUCACAUUGdTdT | 981 |
| A-3066 | UCCACACCAUCUUUGUCAGdTdT | 982 |
| A-3067 | UGCCACACCAUCUUUGUCAdTdT | 983 |
| A-3068 | UAUGCAAUGGUCUCCUGAGdTdT | 984 |
| A-3069 | UGAUGCAAUGGUCUCCUGAdTdT | 985 |
| A-3070 | UCCAAUGAUGCAAUGGUCUdTdT | 986 |
| A-3071 | UGCCAAUGAUGCAAUGGUCdTdT | 987 |
| A-3072 | UUGCGGCCAAUGAUGCAAUdTdT | 988 |
| A-3073 | UACCAGUGUGCGGCCAAUGdTdT | 989 |
| A-3074 | UAUGGACCACCAGUGUGCGdTdT | 990 |
| A-3075 | UUCAUGGACCACCAGUGUGdTdT | 991 |
| A-3076 | UUUCAUGGACCACCAGUGUdTdT | 992 |
| A-3077 | UCUUUUUCAUGGACCACCAdTdT | 993 |
| A-3078 | UCUGCUUUUUCAUGGACCAdTdT | 994 |
| A-3079 | UGCCCAAGUCAUCUGCUUUdTdT | 995 |
| A-3080 | UUUUGCCCAAGUCAUCUGCdTdT | 996 |
| A-3081 | UCACCUUUGCCCAAGUCAUdTdT | 997 |
| A-3082 | UCCACCUUUGCCCAAGUCAdTdT | 998 |
| A-3083 | UUCCACCUUUGCCCAAGUCdTdT | 999 |
| A-3084 | UCGUUUCCUGUCUUUGUACdTdT | 1000 |
| A-3085 | UAGCGUUUCCUGUCUUUGUdTdT | 1001 |
| A-3086 | UCAGCGUUUCCUGUCUUUGdTdT | 1002 |
| A-3087 | UCGACUUCCAGCGUUUCCUdTdT | 1003 |
| A-3088 | UCACCACAAGCCAAACGACdTdT | 1004 |
| A-3089 | UACACCACAAGCCAAACGAdTdT | 1005 |
| A-3090 | UUACACCACAAGCCAAACGdTdT | 1006 |
| A-3091 | UUUACACCACAAGCCAAACdTdT | 1007 |
| A-3092 | UAAUUACACCACAAGCCAAdTdT | 1008 |
| A-3093 | UCCAAUUACACCACAAGCCdTdT | 1009 |
| A-3094 | UCCCAAUUACACCACAAGCdTdT | 1010 |
| A-3095 | UUCCCAAUUACACCACAAGdTdT | 1011 |
| A-3096 | UGAUCCCAAUUACACCACAdTdT | 1012 |
| A-3097 | UCGAUCCCAAUUACACCACdTdT | 1013 |
| A-3098 | UGCGAUCCCAAUUACACCAdTdT | 1014 |
| A-3099 | UUUGGGCGAUCCCAAUUACdTdT | 1015 |
| A-3100 | UAUUGGGCGAUCCCAAUUAdTdT | 1016 |
| A-3101 | UUAUUGGGCGAUCCCAAUUdTdT | 1017 |
| A-3102 | UUUAUUGGGCGAUCCCAAUdTdT | 1018 |
| A-3103 | UUUUAUUGGGCGAUCCCAAdTdT | 1019 |
| A-3104 | UGUUUAUUGGGCGAUCCCAdTdT | 1020 |
| A-3105 | UUGUUUAUUGGGCGAUCCCdTdT | 1021 |
| A-3106 | UGAAUGUUUAUUGGGCGAUdTdT | 1022 |
| A-3107 | UCAAGGGAAUGUUUAUUGGdTdT | 1023 |
| A-3108 | UCCAAGGGAAUGUUUAUUGdTdT | 1024 |
| A-3109 | UUCCAAGGGAAUGUUUAUUdTdT | 1025 |
| A-3110 | UAUCCAAGGGAAUGUUUAUdTdT | 1026 |
| A-3111 | UCAUCCAAGGGAAUGUUUAdTdT | 1027 |
| A-3112 | UACAUCCAAGGGAAUGUUUdTdT | 1028 |
| A-3113 | UUACAUCCAAGGGAAUGUUdTdT | 1029 |
| A-3114 | UGACUACAUCCAAGGGAAUdTdT | 1030 |
| A-3115 | UCCUCAGACUACAUCCAAGdTdT | 1031 |
| A-3116 | UUGAGUUAAGGGGCCUCAGdTdT | 1032 |
| A-3117 | UGAUGAGUUAAGGGGCCUCdTdT | 1033 |
| A-3118 | UAGAUGAGUUAAGGGGCCUdTdT | 1034 |
| A-3119 | UAACAGAUGAGUUAAGGGGdTdT | 1035 |
| A-3120 | UUAACAGAUGAGUUAAGGGdTdT | 1036 |
| A-3121 | UAUAACAGAUGAGUUAAGGdTdT | 1037 |
| A-3122 | UGAUAACAGAUGAGUUAAGdTdT | 1038 |
| A-3123 | UGGAUAACAGAUGAGUUAAdTdT | 1039 |
| A-3124 | UAGGAUAACAGAUGAGUUAdTdT | 1040 |
| A-3125 | UCAGGAUAACAGAUGAGUUdTdT | 1041 |
| A-3126 | UUACAGCUAGCAGGAUAACdTdT | 1042 |
| A-3127 | UCAUUUCUACAGCUAGCAGdTdT | 1043 |
| A-3128 | UACAUUUCUACAGCUAGCAdTdT | 1044 |
| A-3129 | UAGGAUACAUUUCUACAGCdTdT | 1045 |
| A-3130 | UCAGGAUACAUUUCUACAGdTdT | 1046 |
| A-3131 | UUCAGGAUACAUUUCUACAdTdT | 1047 |
| A-3132 | UAUCAGGAUACAUUUCUACdTdT | 1048 |
| A-3133 | UGUUUAUCAGGAUACAUUUdTdT | 1049 |
| A-3134 | UUAAUGUUUAUCAGGAUACdTdT | 1050 |
| A-3135 | UUAAGAUUACAGUGUUUAAdTdT | 1051 |
| A-3136 | UCACUUUUAAGAUUACAGUdTdT | 1052 |
| A-3137 | UACACUUUUAAGAUUACAGdTdT | 1053 |
| A-3138 | UUACACUUUUAAGAUUACAdTdT | 1054 |
| A-3139 | UUUACACUUUUAAGAUUACdTdT | 1055 |
| A-3140 | UCACAAUUACACUUUUAAGdTdT | 1056 |
| A-3141 | UAGUUUCUCACUACAGGUAdTdT | 1057 |
| A-3142 | UUCUUCCAAGUGAUCAUAAdTdT | 1058 |
| A-3143 | UAAUCUUCCAAGUGAUCAUdTdT | 1059 |
| A-3144 | UACAAAUCUUCCAAGUGAUdTdT | 1060 |
| A-3145 | UAACUAUACAAAUCUUCCAdTdT | 1061 |
| A-3146 | UUUUUAACUGAGUUUUAUAdTdT | 1062 |
| A-3147 | UGACAUUUUAACUGAGUUUdTdT | 1063 |
| A-3148 | UCAGGUCAUUGAAACAGACdTdT | 1064 |
| A-3149 | UUGGCAAAAUACAGGUCAUdTdT | 1065 |
| A-3150 | UGUCUGGCAAAAUACAGGUdTdT | 1066 |
| A-3151 | UAGUCUGGCAAAAUACAGGdTdT | 1067 |
| A-3152 | UAUACCCAUCUGUGAUUUAdTdT | 1068 |
| A-3153 | UUUAAUACCCAUCUGUGAUdTdT | 1069 |
| A-3154 | UUUUAAUACCCAUCUGUGAdTdT | 1070 |
| A-3155 | UAGUUUAAUACCCAUCUGUdTdT | 1071 |
| A-3156 | UAAGUUUAAUACCCAUCUGdTdT | 1072 |
| A-3157 | UCAAGUUUAAUACCCAUCUdTdT | 1073 |
| A-3158 | UGACAAGUUUAAUACCCAUdTdT | 1074 |
| A-3159 | UGAAAUUCUGACAAGUUUAdTdT | 1075 |
| A-3160 | UAUUCACAGGCUUGAAUGAdTdT | 1076 |
| A-3161 | UUAUUCACAGGCUUGAAUGdTdT | 1077 |
| A-3162 | UCCAUACAGGGUUUUUAUUdTdT | 1078 |
| A-3163 | UGCCAUACAGGGUUUUUAUdTdT | 1079 |
| A-3164 | UUAAGUGCCAUACAGGGUUdTdT | 1080 |
| A-3165 | UAUAAGUGCCAUACAGGGUdTdT | 1081 |
| A-3166 | UGAUUCUUUUAAUAGCCUCdTdT | 1082 |
| A-3167 | UUUUGAAUUUGGAUUCUUUdTdT | 1083 |
| A-3168 | UUAGUUUGAAUUUGGAUUCdTdT | 1084 |

[0375] In one embodiment, the siRNA molecules of the present invention targeting SOD1 may comprise a nucleotide sequence such as, but not limited to, the sense (passenger) sequences in Table 3 or a fragment or variant thereof. As a non-limiting example, the sense sequence used in the siRNA molecule of the present invention is at least 30%, 40%, 50%, 60%, 70%, 80%, 81%, 82%, 83%, 84%, 85%, 86%, 87%, 88%, 89%, 90%, 91%, 92%, 93%, 94%, 95%, 96%, 97%, 98% or 99% or at least 20-30%, 20-40%, 20-50%, 20-60%, 20-70%, 20-80%, 20-90%, 20-95%, 20-99%, 30-40%, 30-50%, 30-60%, 30-70%, 30-80%, 30-90%, 30-95%, 30-99%, 40-50%, 40-60%, 40-70%, 40-80%, 40-90%, 40-95%, 40-99%, 50-60%, 50-70%, 50-80%, 50-90%, 50-95%, 50-99%, 60-70%, 60-80%, 60-90%, 60-95%, 60-99%, 70-80%, 70-90%, 70-95% 70-99%, 80-90%, 80-95%, 80-99%, 90-95%, 90-99% or 95-99% of a nucleotide sequence in Table 3. As another non-limiting example, the sense sequence used in the siRNA molecule of the present invention comprises at least 3, 4, 5, 6, 7, 8, 9, 10, 11, 12, 13, 14, 15, 16, 17, 18, 19, 20, 21 or more than 21 consecutive nucleotides of a nucleotide sequence in Table 3. As yet another non-limiting example, the sense sequence used in the siRNA molecule of the present invention comprises nucleotides 1 to 22, 1 to 21, 1 to 20, 1 to 19, 1 to 18, 1 to 17, 1 to 16, 1 to 15, 1 to 14, 1 to 13, 1 to 12, 1 to 11, 1 to 10, 1 to 9, 1 to 8, 2 to 22, 2 to 21, 2 to 20, 2 to 19, 2 to 18, 2 to 17, 2 to 16, 2 to 15, 2 to 14, 2 to 13, 2 to 12, 2 to 11, 2 to 10, 2 to 9, 2 to 8, 3 to 22, 3 to 21, 3 to 20, 3 to 19, 3 to 18, 3 to 17, 3 to 16, 3 to 15, 3 to 14, 3 to 13, 3 to 12, 3 to 11, 3 to 10, 3 to 9, 3 to 8, 4 to 22, 4 to 21, 4 to 20, 4 to 19, 4 to 18, 4 to 17, 4 to 16, 4 to 15, 4 to 14, 4 to 13, 4 to 12, 4 to 11, 4 to 10, 4 to 9, 4 to 8, 5 to 22, 5 to 21, 5 to 20, 5 to 19, 5 to 18, 5 to 17, 5 to 16, 5 to 15, 5 to 14, 5 to 13, 5 to 12, 5 to 11, 5 to 10, 5 to 9, 5 to 8, 6 to 22, 6 to 21, 6 to 20, 6 to 19, 6 to 18, 6 to 17, 6 to 16, 6 to 15, 6 to 14, 6 to 13, 6 to 12, 6 to 11, 6 to 10, 7 to 22, 7 to 21, 7 to 20, 7 to 19, 7 to 18, 7 to 17, 7 to 16, 7 to 15, 7 to 14, 7 to 13, 7 to 12, 8 to 22, 8 to 21, 8 to 20, 8 to 19, 8 to 18, 8 to 17, 8 to 16, 8 to 15, 8 to 14, 8 to 13, 8 to 12, 9 to 22, 9 to 21, 9 to 20, 9 to 19, 9 to 18, 9 to 17, 9 to 16, 9 to 15, 9 to 14, 10 to 22, 10 to 21, 10 to 20, 10 to 19, 10 to 18, 10 to 17, 10 to 16, 10 to 15, 10 to 14, 11 to 22, 11 to 21, 11 to 20, 11 to 19, 11 to 18, 11 to 17, 11 to 16, 11 to 15, 11 to 14, 12 to 22, 12 to 21, 12 to 20, 12 to 19, 12 to 18, 12 to 17, 12 to 16, 13 to 22, 13 to 21, 13 to 20, 13 to 19, 13 to 18, 13 to 17, 13 to 16, 14 to 22, 14 to 21, 14 to 20, 14 to 19, 14 to 18, 14 to 17, 15 to 22, 15 to 21, 15 to 20, 15 to 19, 15 wt 18, 16 to 22, 16 to 21, 16 to 20, 17 to 22, 17 t 21, or 18 to 22 of the sequences in Table 3.

TABLE 3
Sense Sequences

| | | SEQ |
|---|---|---|
| Sense | | ID |
| ID | Sequence | NO |
| S-3000 | CGGAGGUCUGGCCUAUAACdTdT | 1085 |
| S-3001 | GGAGGUCUGGCCUAUAAACdTdT | 1086 |
| S-3002 | GAGGUCUGGCCUAUAAAGCdTdT | 1087 |
| S-3003 | AGGUCUGGCCUAUAAAGUCdTdT | 1088 |
| S-3004 | GGUCUGGCCUAUAAAGUACdTdT | 1089 |
| S-3005 | UCUGGCCUAUAAAGUAGUCdTdT | 1090 |
| S-3006 | CUGGCCUAUAAAGUAGUCCdTdT | 1091 |
| S-3007 | UGGCCUAUAAAGUAGUCGCdTdT | 1092 |
| S-3008 | GGCCUAUAAAGUAGUCGCCdTdT | 1093 |
| S-3009 | GCCUAUAAAGUAGUCGCGCdTdT | 1094 |
| S-3010 | CCUAUAAAGUAGUCGCGGCdTdT | 1095 |
| S-3011 | GUCGUAGUCUCCUGCAGCCdTdT | 1096 |
| S-3012 | CGUAGUCUCCUGCAGCGUCdTdT | 1097 |
| S-3013 | GUAGUCUCCUGCAGCGUCCdTdT | 1098 |
| S-3014 | UAGUCUCCUGCAGCGUCUCdTdT | 1099 |
| S-3015 | AUGGCGACGAAGGCCGUGCdTdT | 1100 |
| S-3016 | CGACGAAGGCCGUGUGCGCdTdT | 1101 |
| S-3017 | GAAGGCCGUGUGCGUGCUCdTdT | 1102 |
| S-3018 | GGCCGUGUGCGUGCUGAACdTdT | 1103 |
| S-3019 | AGGGCGACGGCCCAGUGCCdTdT | 1104 |
| S-3020 | UGCAGGGCAUCAUCAAUUCdTdT | 1105 |
| S-3021 | GCAGGGCAUCAUCAAUUUCdTdT | 1106 |
| S-3022 | AGGGCAUCAUCAAUUUCGCdTdT | 1107 |
| S-3023 | GGGCAUCAUCAAUUUCGACdTdT | 1108 |
| S-3024 | GGCAUCAUCAAUUUCGAGCdTdT | 1109 |
| S-3025 | GCAUCAUCAAUUUCGAGCCdTdT | 1110 |
| S-3026 | CAUCAUCAAUUUCGAGCACdTdT | 1111 |
| S-3027 | AAUUUCGAGCAGAAGGAACdTdT | 1112 |
| S-3028 | UUCGAGCAGAAGGAAAGUCdTdT | 1113 |
| S-3029 | UCGAGCAGAAGGAAAGUACdTdT | 1114 |
| S-3030 | AAGGUGUGGGGAAGCAUUCdTdT | 1115 |
| S-3031 | GGUGUGGGGAAGCAUUAACdTdT | 1116 |
| S-3032 | GACUGACUGAAGGCCUGCCdTdT | 1117 |
| S-3033 | CUGACUGAAGGCCUGCAUCdTdT | 1118 |
| S-3034 | UGACUGAAGGCCUGCAUGCdTdT | 1119 |
| S-3035 | UGAAGGCCUGCAUGGAUUCdTdT | 1120 |
| S-3036 | GAAGGCCUGCAUGGAUUCCdTdT | 1121 |
| S-3037 | UGCAUGGAUUCCAUGUUCCdTdT | 1122 |
| S-3038 | CAUGGAUUCCAUGUUCAUCdTdT | 1123 |
| S-3039 | GGAUUCCAUGUUCAUGAGCdTdT | 1124 |
| S-3040 | UUCCAUGUUCAUGAGUUUCdTdT | 1125 |
| S-3041 | GUUCAUGAGUUUGGAGAUCdTdT | 1126 |
| S-3042 | UUCAUGAGUUUGGAGAUACdTdT | 1127 |
| S-3043 | UGAGUUUGGAGAUAAUACCdTdT | 1128 |
| S-3044 | GAGUUUGGAGAUAAUACACdTdT | 1129 |
| S-3045 | AGGCUGUACCAGUGCAGGCdTdT | 1130 |
| S-3046 | GGCUGUACCAGUGCAGGUCdTdT | 1131 |
| S-3047 | GCAGGUCCUCACUUUAAUCdTdT | 1132 |
| S-3048 | CAGGUCCUCACUUUAAUCCdTdT | 1133 |
| S-3049 | UCACUUUAAUCCUCUAUCCdTdT | 1134 |
| S-3050 | CUAUCCAGAAAACACGGUCdTdT | 1135 |
| S-3051 | UAUCCAGAAAACACGGUGCdTdT | 1136 |
| S-3052 | AUCCAGAAAACACGGUGGCdTdT | 1137 |
| S-3053 | CCAGAAAACACGGUGGGCCdTdT | 1138 |
| S-3054 | GAAAACACGGUGGGCCAACdTdT | 1139 |
| S-3055 | AAAACACGGUGGGCCAAACdTdT | 1140 |
| S-3056 | CGGUGGGCCAAAGGAUGACdTdT | 1141 |
| S-3057 | AGGAUGAAGAGAGGCAUGCdTdT | 1142 |
| S-3058 | AUGAAGAGAGGCAUGUUGCdTdT | 1143 |
| S-3059 | GAGAGGCAUGUUGGAGACCdTdT | 1144 |
| S-3060 | AGAGGCAUGUUGGAGACUCdTdT | 1145 |
| S-3061 | AUGUUGGAGACUUGGGCACdTdT | 1146 |
| S-3062 | GUUGGAGACUUGGGCAAUCdTdT | 1147 |
| S-3063 | GGAGACUUGGGCAAUGUGCdTdT | 1148 |
| S-3064 | GGCAAUGUGACUGCUGACCdTdT | 1149 |
| S-3065 | CAAUGUGACUGCUGACAACdTdT | 1150 |
| S-3066 | CUGACAAAGAUGGUGUGGCdTdT | 1151 |
| S-3067 | UGACAAAGAUGGUGUGGCCdTdT | 1152 |
| S-3068 | CUCAGGAGACCAUUGCAUCdTdT | 1153 |
| S-3069 | UCAGGAGACCAUUGCAUCCdTdT | 1154 |
| S-3070 | AGACCAUUGCAUCAUUGGCdTdT | 1155 |
| S-3071 | GACCAUUGCAUCAUUGGCCdTdT | 1156 |
| S-3072 | AUUGCAUCAUUGGCCGCACdTdT | 1157 |
| S-3073 | CAUUGGCCGCACACUGGUCdTdT | 1158 |
| S-3074 | CGCACACUGGUGGUCCAUCdTdT | 1159 |
| S-3075 | CACACUGGUGGUCCAUGACdTdT | 1160 |
| S-3076 | ACACUGGUGGUCCAUGAACdTdT | 1161 |
| S-3077 | UGGUGGUCCAUGAAAAAGCdTdT | 1162 |
| S-3078 | UGGUCCAUGAAAAAGCAGCdTdT | 1163 |
| S-3079 | AAAGCAGAUGACUUGGGCCdTdT | 1164 |
| S-3080 | GCAGAUGACUUGGGCAAACdTdT | 1165 |
| S-3081 | AUGACUUGGGCAAAGGUGCdTdT | 1166 |
| S-3082 | UGACUUGGGCAAAGGUGGCdTdT | 1167 |
| S-3083 | GACUUGGGCAAAGGUGGACdTdT | 1168 |
| S-3084 | GUACAAAGACAGGAAACGCdTdT | 1169 |
| S-3085 | ACAAAGACAGGAAACGCUCdTdT | 1170 |
| S-3086 | CAAAGACAGGAAACGCUGCdTdT | 1171 |
| S-3087 | AGGAAACGCUGGAAGUCGCdTdT | 1172 |
| S-3088 | GUCGUUUGGCUUGUGGUGCdTdT | 1173 |
| S-3089 | UCGUUUGGCUUGUGGUGUCdTdT | 1174 |
| S-3090 | CGUUUGGCUUGUGGUGUACdTdT | 1175 |
| S-3091 | GUUUGGCUUGUGGUGUAACdTdT | 1176 |
| S-3092 | UUGGCUUGUGGUGUAAUUCdTdT | 1177 |
| S-3093 | GGCUUGUGGUGUAAUUGGCdTdT | 1178 |
| S-3094 | GCUUGUGGUGUAAUUGGGCdTdT | 1179 |
| S-3095 | CUUGUGGUGUAAUUGGGACdTdT | 1180 |
| S-3096 | UGUGGUGUAAUUGGGAUCCdTdT | 1181 |
| S-3097 | GUGGUGUAAUUGGGAUCGCdTdT | 1182 |
| S-3098 | UGGUGUAAUUGGGAUCGCCdTdT | 1183 |
| S-3099 | GUAAUUGGGAUCGCCCAACdTdT | 1184 |
| S-3100 | UAAUUGGGAUCGCCCAAUCdTdT | 1185 |
| S-3101 | AAUUGGGAUCGCCCAAUACdTdT | 1186 |
| S-3102 | AUUGGGAUCGCCCAAUAACdTdT | 1187 |
| S-3103 | UUGGGAUCGCCCAAUAAACdTdT | 1188 |
| S-3104 | UGGGACCGCCCAAUAAACCdTdT | 1189 |
| S-3105 | GGGAUCGCCCAAUAAACACdTdT | 1190 |
| S-3106 | AUCGCCCAAUAAACAUUCCdTdT | 1191 |
| S-3107 | CCAAUAAACAUUCCCUUGCdTdT | 1192 |
| S-3108 | CAAUAAACAUUCCCUUGGCdTdT | 1193 |
| S-3109 | AAUAAACAUUCCCUUGGACdTdT | 1194 |
| S-3110 | AUAAACAUUCCCUUGGAUCdTdT | 1195 |
| S-3111 | UAAACAUUCCCUUGGAUGCdTdT | 1196 |
| S-3112 | AAACAUUCCCUUGGAUGUCdTdT | 1197 |
| S-3113 | AACAUUCCCUUGGAUGUACdTdT | 1198 |
| S-3114 | AUUCCCUUGGAUGUAGUCCdTdT | 1199 |
| S-3115 | CUUGGAUGUAGUCUGAGGCdTdT | 1200 |
| S-3116 | CUGAGGCCCCUUAACUCACdTdT | 1201 |
| S-3117 | GAGGCCCCUUAACUCAUCCdTdT | 1202 |
| S-3118 | AGGCCCCUUAACUCAUCUCdTdT | 1203 |
| S-3119 | CCCCUUAACUCAUCUGUUCdTdT | 1204 |
| S-3120 | CCCUUAACUCAUCUGUUACdTdT | 1205 |
| S-3121 | CCUUAACUCAUCUGUUAUCdTdT | 1206 |
| S-3122 | CUUAACUCAUCUGUUAUCCdTdT | 1207 |
| S-3123 | UUAACUCAUCUGUUAUCCCdTdT | 1208 |
| S-3124 | UAACUCAUCUGUUAUCCUCdTdT | 1209 |
| S-3125 | AACUCAUCUGUUAUCCUGCdTdT | 1210 |
| S-3126 | GUUAUCCUGCUAGCUGUACdTdT | 1211 |
| S-3127 | CUGCUAGCUGUAGAAAUGCdTdT | 1212 |
| S-3128 | UGCUAGCUGUAGAAAUGUCdTdT | 1213 |
| S-3129 | GCUGUAGAAAUGUAUCCUCdTdT | 1214 |
| S-3130 | CUGUAGAAAUGUAUCCUGCdTdT | 1215 |
| S-3131 | UGUAGAAAUGUAUCCUGACdTdT | 1216 |
| S-3132 | GUAGAAAUGUAUCCUGAUCdTdT | 1217 |
| S-3133 | AAAUGUAUCCUGAUAAACCdTdT | 1218 |
| S-3134 | GUAUCCUGAUAAACAUUACdTdT | 1219 |
| S-3135 | UUAAACACUGUAAUCUUACdTdT | 1220 |
| S-3136 | ACUGUAAUCUUAAAAGUGCdTdT | 1221 |
| S-3137 | CUGUAAUCUUAAAAGUGUCdTdT | 1222 |
| S-3138 | UGUAAUCUUAAAAGUGUACdTdT | 1223 |
| S-3139 | GUAAUCUUAAAAGUGUAACdTdT | 1224 |
| S-3140 | CUUAAAAGUGUAAUUGUGCdTdT | 1225 |
| S-3141 | UACCUGUAGUGAGAAACUCdTdT | 1226 |
| S-3142 | UUAUGAUCACUUGGAAGACdTdT | 1227 |
| S-3143 | AUGAUCACUUGGAAGAUUCdTdT | 1228 |
| S-3144 | AUCACUUGGAAGAUUUGUCdTdT | 1229 |
| S-3145 | UGGAAGAUUUGUAUAGUUCdTdT | 1230 |
| S-3146 | UAUAAAACUCAGUUAAAACdTdT | 1231 |
| S-3147 | AAACUCAGUUAAAAUGUCCdTdT | 1232 |
| S-3148 | GUCUGUUUCAAUGACCUGCdTdT | 1233 |
| S-3149 | AUGACCUGUAUUUUGCCACdTdT | 1234 |
| S-3150 | ACCUGUAUUUUGCCAGACCdTdT | 1235 |
| S-3151 | CCUGUAUUUUGCCAGACUCdTdT | 1236 |
| S-3152 | UAAAUCACAGAUGGGUAUCdTdT | 1237 |
| S-3153 | AUCACAGAUGGGUAUUAACdTdT | 1238 |
| S-3154 | UCACAGAUGGGUAUUAAACdTdT | 1239 |
| S-3155 | ACAGAUGGGUAUUAAACUCdTdT | 1240 |
| S-3156 | CAGAUGGGUAUUAAACUUCdTdT | 1241 |
| S-3157 | AGAUGGGUAUUAAACUUGCdTdT | 1242 |
| S-3158 | AUGGGUAUUAAACUUGUCCdTdT | 1243 |
| S-3159 | UAAACUUGUCAGAAUUUCCdTdT | 1244 |
| S-3160 | UCAUUCAAGCCUGUGAAUCdTdT | 1245 |
| S-3161 | CAUUCAAGCCUGUGAAUACdTdT | 1246 |
| S-3162 | AAUAAAAACCCUGUAUGGCdTdT | 1247 |
| S-3163 | AUAAAAACCCUGUAUGGCCdTdT | 1248 |
| S-3164 | AACCCUGUAUGGCACUUACdTdT | 1249 |
| S-3165 | ACCCUGUAUGGCACUUAUCdTdT | 1250 |
| S-3166 | GAGGCUAUUAAAAGAAUCCdTdT | 1251 |
| S-3167 | AAAGAAUCCAAAUUCAAACdTdT | 1252 |
| S-3168 | GAAUCCAAAUUCAAACUACdTdT | 1253 |

[0376] In one embodiment, the siRNA molecules of the present invention targeting SOD1 may comprise an antisense sequence from Table 2 and a sense sequence from Table 3, or a fragment or variant thereof. As a non-limiting example, the antisense sequence and the sense sequence have at least 30%, 40%, 50%, 60%, 70%, 80%, 81%, 82%, 83%, 84%, 85%, 86%, 87%, 88%, 89%, 90%, 91%, 92%, 93%, 94%, 95%, 96%, 97%, 98% or 99% or at least 20-30%, 20-40%, 20-50%, 20-60%, 20-70%, 20-80%, 20-90%, 20-95%, 20-99%, 30-40%, 30-50%, 30-60%, 30-70%, 30-80%, 30-90%, 30-95%, 30-99%, 40-50%, 40-60%, 40-70%, 40-80%, 40-90%, 40-95%, 40-99%, 50-60%, 50-70%, 50-80%, 50-90%, 50-95%, 50-99%, 60-70%, 60-80%, 60-90%, 60-95%, 60-99%, 70-80%, 70-90%, 70-95%, 70-99%, 80-90%, 80-95%, 80-99%, 90-95%, 90-99% or 95-99% complementarity.

[0377] In one embodiment, the siRNA molecules of the present invention targeting SOD1 may comprise the sense and antisense siRNA duplex as described in Table 4. As a non-limiting example, these siRNA duplexes may be tested for in vitro inhibitory activity on endogenous SOD1 gene expression. The start site for the sense and antisense sequence is compared to SOD1 gene sequence known as NM_000454.4 (SEQ ID NO: 1254) from NCBI.

TABLE 4
Sense and antisense strand sequences of SOD1
dsRNA

| siRNA | | Sense | | | Antisense | |
|---|---|---|---|---|---|---|
| Du- | | Strand | SS | | Strand | AS |
| plex | SS | Sequence | SEQ | AS | Sequence | SEQ |
| ID | ID | (5′-3′) | ID | ID | (5′-3′) | ID |
| D- | S- | CGGAGGUCUGGC | 1085 | A- | UUUAUAGGCCA | 916 |
| 2741 | 3000 | CUAUAACdTdT | | 3000 | GACCUCCGdTdT | |
| D- | S- | GGAGGUCUGGCC | 1086 | A- | UUUUAUAGGCC | 917 |
| 2742 | 3001 | UAUAAACdTdT | | 3001 | AGACCUCCdTdT | |
| D- | S- | GAGGUCUGGCCU | 1087 | A- | UCUUUAUAGGC | 918 |
| 2743 | 3002 | AUAAAGCdTdT | | 3002 | CAGACCUCdTdT | |
| D- | S- | AGGUCUGGCCUA | 1088 | A- | UACUUUAUAGG | 919 |
| 2744 | 3003 | UAAAGUCdTdT | | 3003 | CCAGACCUdTdT | |
| D- | S- | GGUCUGGCCUAU | 1089 | A- | UUACUUUAUAG | 920 |
| 2745 | 3004 | AAAGUACdTdT | | 3004 | GCCAGACCdTdT | |
| D- | S- | UCUGGCCUAUAA | 1090 | A- | UACUACUUUAU | 921 |
| 2746 | 3005 | AGUAGUCdTdT | | 3005 | AGGCCAGAdTdT | |
| D- | S- | CUGGCCUAUAAA | 1091 | A- | UGACUACUUUA | 922 |
| 2747 | 3006 | GUAGUCCdTdT | | 3006 | UAGGCCAGdTdT | |
| D- | S- | UGGCCUAUAAAG | 1092 | A- | UCGACUACUUU | 923 |
| 2748 | 3007 | UAGUCGCdTdT | | 3007 | AUAGGCCAdTdT | |
| D- | S- | GGCCUAUAAAGU | 1093 | A- | UGCGACUACUU | 924 |
| 2749 | 3008 | AGUCGCCdTdT | | 3008 | UAUAGGCCdTdT | |
| D- | S- | GCCUAUAAAGUA | 1094 | A- | UCGCGACUACU | 925 |
| 2750 | 3009 | GUCGCGCdTdT | | 3009 | UUAUAGGCdTdT | |
| D- | S- | CCUAUAAAGUAG | 1095 | A- | UCCGCGACUAC | 926 |
| 2751 | 3010 | UCGCGGCdTdT | | 3010 | UUUAUAGGdTdT | |
| D- | S- | GUCGUAGUCUCC | 1096 | A- | UGCUGCAGGAG | 927 |
| 2752 | 3011 | UGCAGCCdTdT | | 3011 | ACUACGACdTdT | |
| D- | S- | CGUAGUCUCCUG | 1097 | A- | UACGCUGCAGG | 928 |
| 2753 | 3012 | CAGCGUCdTdT | | 3012 | AGACUACGdTdT | |
| D- | S- | GUAGUCUCCUGC | 1098 | A- | UGACGCUGCAG | 929 |
| 2754 | 3013 | AGCGUCCdTdT | | 3013 | GAGACUACdTdT | |
| D- | S- | UAGUCUCCUGCA | 1099 | A- | UAGACGCUGCA | 930 |
| 2755 | 3014 | GCGUCUCdTdT | | 3014 | GGAGACUAdTdT | |
| D- | S- | AUGGCGACGAAG | 1100 | A- | UCACGGCCUUC | 931 |
| 2756 | 3015 | GCCGUGCdTdT | | 3015 | GUCGCCAUdTdT | |
| D- | S- | CGACGAAGGCCG | 1101 | A- | UCGCACACGGCC | 932 |
| 2757 | 3016 | UGUGCGCdTdT | | 3016 | UUCGUCGdTdT | |
| D- | S- | GAAGGCCGUGUG | 1102 | A- | UAGCACGCACA | 933 |
| 2758 | 3017 | CGUGCUCdTdT | | 3017 | CGGCCUUCdTdT | |
| D- | S- | GGCCGUGUGCGU | 1103 | A- | UUUCAGCACGC | 934 |
| 2759 | 3018 | GCUGAACdTdT | | 3018 | ACACGGCCdTdT | |
| D- | S- | AGGGCGACGGCC | 1104 | A- | UGCACUGGGCC | 935 |
| 2760 | 3019 | CAGUGCCdTdT | | 3019 | GUCGCCCUdTdT | |
| D- | S- | UGCAGGGCAUCA | 1105 | A- | UAAUUGAUGAU | 936 |
| 2761 | 3020 | UCAAUUCdTdT | | 3020 | GCCCUGCAdTdT | |
| D- | S- | GCAGGGCAUCAU | 1106 | A- | UAAAUUGAUGA | 937 |
| 2762 | 3021 | CAAUUUCdTdT | | 3021 | UGCCCUGCdTdT | |
| D- | S- | AGGGCAUCAUCA | 1107 | A- | UCGAAAUUGAU | 938 |
| 2763 | 3022 | AUUUCGCdTdT | | 3022 | GAUGCCCUdTdT | |
| D- | S- | GGGCAUCAUCAA | 1108 | A- | UUCGAAAUUGA | 939 |
| 2764 | 3023 | UUUCGACdTdT | | 3023 | UGAUGCCCdTdT | |
| D- | S- | GGCAUCAUCAAU | 1109 | A- | UCUCGAAAUUG | 940 |
| 2765 | 3024 | UUCGAGCdTdT | | 3024 | AUGAUGCCdTdT | |
| D- | S- | GCAUCAUCAAUU | 1110 | A- | UGCUCGAAAUU | 941 |
| 2766 | 3025 | UCGAGCCdTdT | | 3025 | GAUGAUGCdTdT | |
| D- | S- | CAUCAUCAAUUU | 1111 | A- | UUGCUCGAAAU | 942 |
| 2767 | 3026 | CGAGCACdTdT | | 3026 | UGAUGAUGdTdT | |
| D- | S- | AAUUUCGAGCAG | 1112 | A- | UUUCCUUCUGC | 943 |
| 2768 | 3027 | AAGGAACdTdT | | 3027 | UCGAAAUUdTdT | |
| D- | S- | UUCGAGCAGAAG | 1113 | A- | UACUUUCCUUC | 944 |
| 2769 | 3028 | GAAAGUCdTdT | | 3028 | UGCUCGAAdTdT | |
| D- | S- | UCGAGCAGAAGG | 1114 | A- | UUACUUUCCUU | 945 |
| 2770 | 3029 | AAAGUACdTdT | | 3029 | CUGCUCGAdTdT | |
| D- | S- | AAGGUGUGGGGA | 1115 | A- | UAAUGCUUCCC | 946 |
| 2771 | 3030 | AGCAUUCdTdT | | 3030 | CACACCUUdTdT | |
| D- | S- | GGUGUGGGGAAG | 1116 | A- | UUUAAUGCUUC | 947 |
| 2772 | 3031 | CAUUAACdTdT | | 3031 | CCCACACCdTdT | |
| D- | S- | GACUGACUGAAG | 1117 | A- | UGCAGGCCUUC | 948 |
| 2773 | 3032 | GCCUGCCdTdT | | 3032 | AGUCAGUCdTdT | |
| D- | S- | CUGACUGAAGGC | 1118 | A- | UAUGCAGGCCU | 949 |
| 2774 | 3033 | CUGCAUCdTdT | | 3033 | UCAGUCAGdTdT | |
| D- | S- | UGACUGAAGGCC | 1119 | A- | UCAUGCAGGCC | 950 |
| 2775 | 3034 | UGCAUGCdTdT | | 3034 | UUCAGUCAdTdT | |
| D- | S- | UGAAGGCCUGCA | 1120 | A- | UAAUCCAUGCA | 951 |
| 2776 | 3035 | UGGAUUCdTdT | | 3035 | GGCCUUCAdTdT | |
| D- | S- | GAAGGCCUGCAU | 1121 | A- | UGAAUCCAUGC | 952 |
| 2777 | 3036 | GGAUUCCdTdT | | 3036 | AGGCCUUCdTdT | |
| D- | S- | UGCAUGGAUUCC | 1122 | A- | UGAACAUGGAA | 953 |
| 2778 | 3037 | AUGUUCCdTdT | | 3037 | UCCAUGCAdTdT | |
| D- | S- | CAUGGAUUCCAU | 1123 | A- | UAUGAACAUGG | 954 |
| 2779 | 3038 | GUUCAUCdTdT | | 3038 | AAUCCAUGdTdT | |
| D- | S- | GGAUUCCAUGUU | 1124 | A- | UCUCAUGAACA | 955 |
| 2780 | 3039 | CAUGAGCdTdT | | 3039 | UGGAAUCCdTdT | |
| D- | S- | UUCCAUGUUCAU | 1125 | A- | UAAACUCAUGA | 956 |
| 2781 | 3040 | GAGUUUCdTdT | | 3040 | ACAUGGAAdTdT | |
| D- | S- | GUUCAUGAGUUU | 1126 | A- | UAUCUCCAAAC | 957 |
| 2782 | 3041 | GGAGAUCdTdT | | 3041 | UCAUGAACdTdT | |
| D- | S- | UUCAUGAGUUUG | 1127 | A- | UUAUCUCCAAA | 958 |
| 2783 | 3042 | GAGAUACdTdT | | 3042 | CUCAUGAAdTdT | |
| D- | S- | UGAGUUUGGAGA | 1128 | A- | UGUAUUAUCUC | 959 |
| 2784 | 3043 | UAAUACCdTdT | | 3043 | CAAACUCAdTdT | |
| D- | S- | GAGUUUGGAGAU | 1129 | A- | UUGUAUUAUCU | 960 |
| 2785 | 3044 | AAUACACdTdT | | 3044 | CCAAACUCdTdT | |
| D- | S- | AGGCUGUACCAG | 1130 | A- | UCCUGCACUGG | 961 |
| 2786 | 3045 | UGCAGGCdTdT | | 3045 | UACAGCCUdTdT | |
| D- | S- | GGCUGUACCAGU | 1131 | A- | UACCUGCACUG | 962 |
| 2787 | 3046 | GCAGGUCdTdT | | 3046 | GUACAGCCdTdT | |
| D- | S- | GCAGGUCCUCAC | 1132 | A- | UAUUAAAGUGA | 963 |
| 2788 | 3047 | UUUAAUCdTdT | | 3047 | GGACCUGCdTdT | |
| D- | S- | CAGGUCCUCACU | 1133 | A- | UGAUUAAAGUG | 964 |
| 2789 | 3048 | UUAAUCCdTdT | | 3048 | AGGACCUGdTdT | |
| D- | S- | UCACUUUAAUCC | 1134 | A- | UGAUAGAGGAU | 965 |
| 2790 | 3049 | UCUAUCCdTdT | | 3049 | UAAAGUGAdTdT | |
| D- | S- | CUAUCCAGAAAA | 1135 | A- | UACCGUGUUUU | 966 |
| 2791 | 3050 | CACGGUCdTdT | | 3050 | CUGGAUAGdTdT | |
| D- | S- | UAUCCAGAAAAC | 1136 | A- | UCACCGUGUUU | 967 |
| 2792 | 3051 | ACGGUGCdTdT | | 3051 | UCUGGAUAdTdT | |
| D- | S- | AUCCAGAAAACA | 1137 | A- | UCCACCGUGUU | 968 |
| 2793 | 3052 | CGGUGGCdTdT | | 3052 | UUCUGGAUdTdT | |
| D- | S- | CCAGAAAACACG | 1138 | A- | UGCCCACCGUG | 969 |
| 2794 | 3053 | GUGGGCCdTdT | | 3053 | UUUUCUGGdTdT | |
| D- | S- | GAAAACACGGUG | 1139 | A- | UUUGGCCCACC | 970 |
| 2795 | 3054 | GGCCAACdTdT | | 3054 | GUGUUUUCdTdT | |
| D- | S- | AAAACACGGUGG | 1140 | A- | UUUUGGCCCAC | 971 |
| 2796 | 3055 | GCCAAACdTdT | | 3055 | CGUGUUUUdTdT | |
| D- | S- | CGGUGGGCCAAA | 1141 | A- | UUCAUCCUUUG | 972 |
| 2797 | 3056 | GGAUGACdTdT | | 3056 | GCCCACCGdTdT | |
| D- | S- | AGGAUGAAGAGA | 1142 | A- | UCAUGCCUCUC | 973 |
| 2798 | 3057 | GGCAUGCdTdT | | 3057 | UUCAUCCUdTdT | |
| D- | S- | AUGAAGAGAGGC | 1143 | A- | UCAACAUGCCU | 974 |
| 2799 | 3058 | AUGUUGCdTdT | | 3058 | CUCUUCAUdTdT | |
| D- | S- | GAGAGGCAUGUU | 1144 | A- | UGUCUCCAACA | 975 |
| 2800 | 3059 | GGAGACCdTdT | | 3059 | UGCCUCUCdTdT | |
| D- | S- | AGAGGCAUGUUG | 1145 | A- | UAGUCUCCAAC | 976 |
| 2801 | 3060 | GAGACUCdTdT | | 3060 | AUGCCUCUdTdT | |
| D- | S- | AUGUUGGAGACU | 1146 | A- | UUGCCCAAGUC | 977 |
| 2802 | 3061 | UGGGCACdTdT | | 3061 | UCCAACAUdTdT | |
| D- | S- | GUUGGAGACUUG | 1147 | A- | UAUUGCCCAAG | 978 |
| 2803 | 3062 | GGCAAUCdTdT | | 3062 | UCUCCAACdTdT | |
| D- | S- | GGAGACUUGGGC | 1148 | A- | UCACAUUGCCC | 979 |
| 2804 | 3063 | AAUGUGCdTdT | | 3063 | AAGUCUCCdTdT | |
| D- | S- | GGCAAUGUGACU | 1149 | A- | UGUCAGCAGUC | 980 |
| 2805 | 3064 | GCUGACCdTdT | | 3064 | ACAUUGCCdTdT | |
| D- | S- | CAAUGUGACUGC | 1150 | A- | UUUGUCAGCAG | 981 |
| 2806 | 3065 | UGACAACdTdT | | 3065 | UCACAUUGdTdT | |
| D- | S- | CUGACAAAGAUG | 1151 | A- | UCCACACCAUCU | 982 |
| 2807 | 3066 | GUGUGGCdTdT | | 3066 | UUGUCAGdTdT | |
| D- | S- | UGACAAAGAUGG | 1152 | A- | UGCCACACCAUC | 983 |
| 2808 | 3067 | UGUGGCCdTdT | | 3067 | UUUGUCAdTdT | |
| D- | S- | CUCAGGAGACCA | 1153 | A- | UAUGCAAUGGU | 984 |
| 2809 | 3068 | UUGCAUCdTdT | | 3068 | CUCCUGAGdTdT | |
| D- | S- | UCAGGAGACCAU | 1154 | A- | UGAUGCAAUGG | 985 |
| 2810 | 3069 | UGCAUCCdTdT | | 3069 | UCUCCUGAdTdT | |
| D- | S- | AGACCAUUGCAU | 1155 | A- | UCCAAUGAUGC | 986 |
| 2811 | 3070 | CAUUGGCdTdT | | 3070 | AAUGGUCUdTdT | |
| D- | S- | GACCAUUGCAUC | 1156 | A- | UGCCAAUGAUG | 987 |
| 2812 | 3071 | AUUGGCCdTdT | | 3071 | CAAUGGUCdTdT | |
| D- | S- | AUUGCAUCAUUG | 1157 | A- | UUGCGGCCAAU | 988 |
| 2813 | 3072 | GCCGCACdTdT | | 3072 | GAUGCAAUdTdT | |
| D- | S- | CAUUGGCCGCAC | 1158 | A- | UACCAGUGUGC | 989 |
| 2814 | 3073 | ACUGGUCdTdT | | 3073 | GGCCAAUGdTdT | |
| D- | S- | CGCACACUGGUG | 1159 | A- | UAUGGACCACC | 990 |
| 2815 | 3074 | GUCCAUCdTdT | | 3074 | AGUGUGCGdTdT | |
| D- | S- | CACACUGGUGGU | 1160 | A- | UUCAUGGACCA | 991 |
| 2816 | 3075 | CCAUGACdTdT | | 3075 | CCAGUGUGdTdT | |
| D- | S- | ACACUGGUGGUC | 1161 | A- | UUUCAUGGACC | 992 |
| 2817 | 3076 | CAUGAACdTdT | | 3076 | ACCAGUGUdTdT | |
| D- | S- | UGGUGGUCCAUG | 1162 | A- | UCUUUUUCAUG | 993 |
| 2818 | 3077 | AAAAAGCdTdT | | 3077 | GACCACCAdTdT | |
| D- | S- | UGGUCCAUGAAA | 1163 | A- | UCUGCUUUUUC | 994 |
| 2819 | 3078 | AAGCAGCdTdT | | 3078 | AUGGACCAdTdT | |
| D- | S- | AAAGCAGAUGAC | 1164 | A- | UGCCCAAGUCA | 995 |
| 2820 | 3079 | UUGGGCCdTdT | | 3079 | UCUGCUUUdTdT | |
| D- | S- | GCAGAUGACUUG | 1165 | A- | UUUUGCCCAAG | 996 |
| 2821 | 3080 | GGCAAACdTdT | | 3080 | UCAUCUGCdTdT | |
| D- | S- | AUGACUUGGGCA | 1166 | A- | UCACCUUUGCCC | 997 |
| 2822 | 3081 | AAGGUGCdTdT | | 3081 | AAGUCAUdTdT | |
| D- | S- | UGACUUGGGCAA | 1167 | A- | UCCACCUUUGCC | 998 |
| 2823 | 3082 | AGGUGGCdTdT | | 3082 | CAAGUCAdTdT | |
| D- | S- | GACUUGGGCAAA | 1168 | A- | UUCCACCUUUG | 999 |
| 2824 | 3083 | GGUGGACdTdT | | 3083 | CCCAAGUCdTdT | |
| D- | S- | GUACAAAGACAG | 1169 | A- | UCGUUUCCUGU | 1000 |
| 2825 | 3084 | GAAACGCdTdT | | 3084 | CUUUGUACdTdT | |
| D- | S- | ACAAAGACAGGA | 1170 | A- | UAGCGUUUCCU | 1001 |
| 2826 | 3085 | AACGCUCdTdT | | 3085 | GUCUUUGUdTdT | |
| D- | S- | CAAAGACAGGAA | 1171 | A- | UCAGCGUUUCC | 1002 |
| 2827 | 3086 | ACGCUGCdTdT | | 3086 | UGUCUUUGdTdT | |
| D- | S- | AGGAAACGCUGG | 1172 | A- | UCGACUUCCAG | 1003 |
| 2828 | 3087 | AAGUCGCdTdT | | 3087 | CGUUUCCUdTdT | |
| D- | S- | GUCGUUUGGCUU | 1173 | A- | UCACCACAAGCC | 1004 |
| 2829 | 3088 | GUGGUGCdTdT | | 3088 | AAACGACdTdT | |
| D- | S- | UCGUUUGGCUUG | 1174 | A- | UACACCACAAG | 1005 |
| 2830 | 3089 | UGGUGUCdTdT | | 3089 | CCAAACGAdTdT | |
| D- | S- | CGUUUGGCUUGU | 1175 | A- | UUACACCACAA | 1006 |
| 2831 | 3090 | GGUGUACdTdT | | 3090 | GCCAAACGdTdT | |
| D- | S- | GUUUGGCUUGUG | 1176 | A- | UUUACACCACA | 1007 |
| 2832 | 3091 | GUGUAACdTdT | | 3091 | AGCCAAACdTdT | |
| D- | S- | UUGGCUUGUGGU | 1177 | A- | UAAUUACACCA | 1008 |
| 2833 | 3092 | GUAAUUCdTdT | | 3092 | CAAGCCAAdTdT | |
| D- | S- | GGCUUGUGGUGU | 1178 | A- | UCCAAUUACAC | 1009 |
| 2834 | 3093 | AAUUGGCdTdT | | 3093 | CACAAGCCdTdT | |
| D- | S- | GCUUGUGGUGUA | 1179 | A- | UCCCAAUUACA | 1010 |
| 2835 | 3094 | AUUGGGCdTdT | | 3094 | CCACAAGCdTdT | |
| D- | S- | CUUGUGGUGUAA | 1180 | A- | UUCCCAAUUAC | 1011 |
| 2836 | 3095 | UUGGGACdTdT | | 3095 | ACCACAAGdTdT | |
| D- | S- | UGUGGUGUAAUU | 1181 | A- | UGAUCCCAAUU | 1012 |
| 2837 | 3096 | GGGAUCCdTdT | | 3096 | ACACCACAdTdT | |
| D- | S- | GUGGUGUAAUUG | 1182 | A- | UCGAUCCCAAU | 1013 |
| 2838 | 3097 | GGAUCGCdTdT | | 3097 | UACACCACdTdT | |
| D- | S- | UGGUGUAAUUGG | 1183 | A- | UGCGAUCCCAA | 1014 |
| 2839 | 3098 | GAUCGCCdTdT | | 3098 | UUACACCAdTdT | |
| D- | S- | GUAAUUGGGAUC | 1184 | A- | UUUGGGCGAUC | 1015 |
| 2840 | 3099 | GCCCAACdTdT | | 3099 | CCAAUUACdTdT | |
| D- | S- | UAAUUGGGAUCG | 1185 | A- | UAUUGGGCGAU | 1016 |
| 2841 | 3100 | CCCAAUCdTdT | | 3100 | CCCAAUUAdTdT | |
| D- | S- | AAUUGGGAUCGC | 1186 | A- | UUAUUGGGCGA | 1017 |
| 2842 | 3101 | CCAAUACdTdT | | 3101 | UCCCAAUUdTdT | |
| D- | S- | AUUGGGAUCGCC | 1187 | A- | UUUAUUGGGCG | 1018 |
| 2843 | 3102 | CAAUAACdTdT | | 3102 | AUCCCAAUdTdT | |
| D- | S- | UUGGGAUCGCCC | 1188 | A- | UUUUAUUGGGC | 1019 |
| 2844 | 3103 | AAUAAACdTdT | | 3103 | GAUCCCAAdTdT | |
| D- | S- | UGGGAUCGCCCA | 1189 | A- | UGUUUAUUGGG | 1020 |
| 2845 | 3104 | AUAAACCdTdT | | 3104 | CGAUCCCAdTdT | |
| D- | S- | GGGAUCGCCCAA | 1190 | A- | UUGUUUAUUGG | 1021 |
| 2846 | 3105 | UAAACACdTdT | | 3105 | GCGAUCCCdTdT | |
| D- | S- | AUCGCCCAAUAA | 1191 | A- | UGAAUGUUUAU | 1022 |
| 2847 | 3106 | ACAUUCCdTdT | | 3106 | UGGGCGAUdTdT | |
| D- | S- | CCAAUAAACAUU | 1192 | A- | UCAAGGGAAUG | 1023 |
| 2848 | 3107 | CCCUUGCdTdT | | 3107 | UUUAUUGGdTdT | |
| D- | S- | CAAUAAACAUUC | 1193 | A- | UCCAAGGGAAU | 1024 |
| 2849 | 3108 | CCUUGGCdTdT | | 3108 | GUUUAUUGdTdT | |
| D- | S- | AAUAAACAUUCC | 1194 | A- | UUCCAAGGGAA | 1025 |
| 2850 | 3109 | CUUGGACdTdT | | 3109 | UGUUUAUUdTdT | |
| D- | S- | AUAAACAUUCCC | 1195 | A- | UAUCCAAGGGA | 1026 |
| 2851 | 3110 | UUGGAUCdTdT | | 3110 | AUGUUUAUdTdT | |
| D- | S- | UAAACAUUCCCU | 1196 | A- | UCAUCCAAGGG | 1027 |
| 2852 | 3111 | UGGAUGCdTdT | | 3111 | AAUGUUUAdTdT | |
| D- | S- | AAACAUUCCCUU | 1197 | A- | UACAUCCAAGG | 1028 |
| 2853 | 3112 | GGAUGUCdTdT | | 3112 | GAAUGUUUdTdT | |
| D- | S- | AACAUUCCCUUG | 1198 | A- | UUACAUCCAAG | 1029 |
| 2854 | 3113 | GAUGUACdTdT | | 3113 | GGAAUGUUdTdT | |
| D- | S- | AUUCCCUUGGAU | 1199 | A- | UGACUACAUCC | 1030 |
| 2855 | 3114 | GUAGUCCdTdT | | 3114 | AAGGGAAUdTdT | |
| D- | S- | CUUGGAUGUAGU | 1200 | A- | UCCUCAGACUA | 1031 |
| 2856 | 3115 | CUGAGGCdTdT | | 3115 | CAUCCAAGdTdT | |
| D- | S- | CUGAGGCCCCUU | 1201 | A- | UUGAGUUAAGG | 1032 |
| 2857 | 3116 | AACUCACdTdT | | 3116 | GGCCUCAGdTdT | |
| D- | S- | GAGGCCCCUUAA | 1202 | A- | UGAUGAGUUAA | 1033 |
| 2858 | 3117 | CUCAUCCdTdT | | 3117 | GGGGCCUCdTdT | |
| D- | S- | AGGCCCCUUAAC | 1203 | A- | UAGAUGAGUUA | 1034 |
| 2859 | 3118 | UCAUCUCdTdT | | 3118 | AGGGGCCUdTdT | |
| D- | S- | CCCCUUAACUCA | 1204 | A- | UAACAGAUGAG | 1035 |
| 2860 | 3119 | UCUGUUCdTdT | | 3119 | UUAAGGGGdTdT | |
| D- | S- | CCCUUAACUCAU | 1205 | A- | UUAACAGAUGA | 1036 |
| 2861 | 3120 | CUGUUACdTdT | | 3120 | GUUAAGGGdTdT | |
| D- | S- | CCUUAACUCAUC | 1206 | A- | UAUAACAGAUG | 1037 |
| 2862 | 3121 | UGUUAUCdTdT | | 3121 | AGUUAAGGdTdT | |
| D- | S- | CUUAACUCAUCU | 1207 | A- | UGAUAACAGAU | 1038 |
| 2863 | 3122 | GUUAUCCdTdT | | 3122 | GAGUUAAGdTdT | |
| D- | S- | UUAACUCAUCUG | 1208 | A- | UGGAUAACAGA | 1039 |
| 2864 | 3123 | UUAUCCCdTdT | | 3123 | UGAGUUAAdTdT | |
| D- | S- | UAACUCAUCUGU | 1209 | A- | UAGGAUAACAG | 1040 |
| 2865 | 3124 | UAUCCUCdTdT | | 3124 | AUGAGUUAdTdT | |
| D- | S- | AACUCAUCUGUU | 1210 | A- | UCAGGAUAACA | 1041 |
| 2866 | 3125 | AUCCUGCdTdT | | 3125 | GAUGAGUUdTdT | |
| D- | S- | GUUAUCCUGCUA | 1211 | A- | UUACAGCUAGC | 1042 |
| 2867 | 3126 | GCUGUACdTdT | | 3126 | AGGAUAACdTdT | |
| D- | S- | CUGCUAGCUGUA | 1212 | A- | UCAUUUCUACA | 1043 |
| 2868 | 3127 | GAAAUGCdTdT | | 3127 | GCUAGCAGdTdT | |
| D- | S- | UGCUAGCUGUAG | 1213 | A- | UACAUUUCUAC | 1044 |
| 2869 | 3128 | AAAUGUCdTdT | | 3128 | AGCUAGCAdTdT | |
| D- | S- | GCUGUAGAAAUG | 1214 | A- | UAGGAUACAUU | 1045 |
| 2870 | 3129 | UAUCCUCdTdT | | 3129 | UCUACAGCdTdT | |
| D- | S- | CUGUAGAAAUGU | 1215 | A- | UCAGGAUACAU | 1046 |
| 2871 | 3130 | AUCCUGCdTdT | | 3130 | UUCUACAGdTdT | |
| D- | S- | UGUAGAAAUGUA | 1216 | A- | UUCAGGAUACA | 1047 |
| 2872 | 3131 | UCCUGACdTdT | | 3131 | UUUCUACAdTdT | |
| D- | S- | GUAGAAAUGUAU | 1217 | A- | UAUCAGGAUAC | 1048 |
| 2873 | 3132 | CCUGAUCdTdT | | 3132 | AUUUCUACdTdT | |
| D- | S- | AAAUGUAUCCUG | 1218 | A- | UGUUUAUCAGG | 1049 |
| 2874 | 3133 | AUAAACCdTdT | | 3133 | AUACAUUUdTdT | |
| D- | S- | GUAUCCUGAUAA | 1219 | A- | UUAAUGUUUAU | 1050 |
| 2875 | 3134 | ACAUUACdTdT | | 3134 | CAGGAUACdTdT | |
| D- | S- | UUAAACACUGUA | 1220 | A- | UUAAGAUUACA | 1051 |
| 2876 | 3135 | AUCUUACdTdT | | 3135 | GUGUUUAAdTdT | |
| D- | S- | ACUGUAAUCUUA | 1221 | A- | UCACUUUUAAG | 1052 |
| 2877 | 3136 | AAAGUGCdTdT | | 3136 | AUUACAGUdTdT | |
| D- | S- | CUGUAAUCUUAA | 1222 | A- | UACACUUUUAA | 1053 |
| 2878 | 3137 | AAGUGUCdTdT | | 3137 | GAUUACAGdTdT | |
| D- | S- | UGUAAUCUUAAA | 1223 | A- | UUACACUUUUA | 1054 |
| 2879 | 3138 | AGUGUACdTdT | | 3138 | AGAUUACAdTdT | |
| D- | S- | GUAAUCUUAAAA | 1224 | A- | UUUACACUUUU | 1055 |
| 2880 | 3139 | GUGUAACdTdT | | 3139 | AAGAUUACdTdT | |
| D- | S- | CUUAAAAGUGUA | 1225 | A- | UCACAAUUACA | 1056 |
| 2881 | 3140 | AUUGUGCdTdT | | 3140 | CUUUUAAGdTdT | |
| D- | S- | UACCUGUAGUGA | 1226 | A- | UAGUUUCUCAC | 1057 |
| 2882 | 3141 | GAAACUCdTdT | | 3141 | UACAGGUAdTdT | |
| D- | S- | UUAUGAUCACUU | 1227 | A- | UUCUUCCAAGU | 1058 |
| 2883 | 3142 | GGAAGACdTdT | | 3142 | GAUCAUAAdTdT | |
| D- | S- | AUGAUCACUUGG | 1228 | A- | UAAUCUUCCAA | 1059 |
| 2884 | 3143 | AAGAUUCdTdT | | 3143 | GUGAUCAUdTdT | |
| D- | S- | AUCACUUGGAAG | 1229 | A- | UACAAAUCUUC | 1060 |
| 2885 | 3144 | AUUUGUCdTdT | | 3144 | CAAGUGAUdTdT | |
| D- | S- | UGGAAGAUUUGU | 1230 | A- | UAACUAUACAA | 1061 |
| 2886 | 3145 | AUAGUUCdTdT | | 3145 | AUCUUCCAdTdT | |
| D- | S- | UAUAAAACUCAG | 1231 | A- | UUUUUAACUGA | 1062 |
| 2887 | 3146 | UUAAAACdTdT | | 3146 | GUUUUAUAdTdT | |
| D- | S- | AAACUCAGUUAA | 1232 | A- | UGACAUUUUAA | 1063 |
| 2888 | 3147 | AAUGUCCdTdT | | 3147 | CUGAGUUUdTdT | |
| D- | S- | GUCUGUUUCAAU | 1233 | A- | UCAGGUCAUUG | 1064 |
| 2889 | 3148 | GACCUGCdTdT | | 3148 | AAACAGACdTdT | |
| D- | S- | AUGACCUGUAUU | 1234 | A- | UUGGCAAAAUA | 1065 |
| 2890 | 3149 | UUGCCACdTdT | | 3149 | CAGGUCAUdTdT | |
| D- | S- | ACCUGUAUUUUG | 1235 | A- | UGUCUGGCAAA | 1066 |
| 2891 | 3150 | CCAGACCdTdT | | 3150 | AUACAGGUdTdT | |
| D- | S- | CCUGUAUUUUGC | 1236 | A- | UAGUCUGGCAA | 1067 |
| 2892 | 3151 | CAGACUCdTdT | | 3151 | AAUACAGGdTdT | |
| D- | S- | UAAAUCACAGAU | 1237 | A- | UAUACCCAUCU | 1068 |
| 2893 | 3152 | GGGUAUCdTdT | | 3152 | GUGAUUUAdTdT | |
| D- | S- | AUCACAGAUGGG | 1238 | A- | UUUAAUACCCA | 1069 |
| 2894 | 3153 | UAUUAACdTdT | | 3153 | UCUGUGAUdTdT | |
| D- | S- | UCACAGAUGGGU | 1239 | A- | UUUUAAUACCC | 1070 |
| 2895 | 3154 | AUUAAACdTdT | | 3154 | AUCUGUGAdTdT | |
| D- | S- | ACAGAUGGGUAU | 1240 | A- | UAGUUUAAUAC | 1071 |
| 2896 | 3155 | UAAACUCdTdT | | 3155 | CCAUCUGUdTdT | |
| D- | S- | CAGAUGGGUAUU | 1241 | A- | UAAGUUUAAUA | 1072 |
| 2897 | 3156 | AAACUUCATdT | | 3156 | CCCAUCUGdTdT | |
| D- | S- | AGAUGGGUAUUA | 1242 | A- | UCAAGUUUAAU | 1073 |
| 2898 | 3157 | AACUUGCdTdT | | 3157 | ACCCAUCUdTdT | |
| D- | S- | AUGGGUAUUAAA | 1243 | A- | UGACAAGUUUA | 1074 |
| 2899 | 3158 | CUUGUCCdTdT | | 3158 | AUACCCAUdTdT | |
| D- | S- | UAAACUUGUCAG | 1244 | A- | UGAAAUUCUGA | 1075 |
| 2900 | 3159 | AAUUUCCdTdT | | 3159 | CAAGUUUAdTdT | |
| D- | S- | UCAUUCAAGCCU | 1245 | A- | UAUUCACAGGC | 1076 |
| 2901 | 3160 | GUGAAUCdTdT | | 3160 | UUGAAUGAdTdT | |
| D- | S- | CAUUCAAGCCUG | 1246 | A- | UUAUUCACAGG | 1077 |
| 2902 | 3161 | UGAAUACdTdT | | 3161 | CUUGAAUGdTdT | |
| D- | S- | AAUAAAAACCCU | 1247 | A- | UCCAUACAGGG | 1078 |
| 2903 | 3162 | GUAUGGCdTdT | | 3162 | UUUUUAUUdTdT | |
| D- | S- | AUAAAAACCCUG | 1248 | A- | UGCCAUACAGG | 1079 |
| 2904 | 3163 | UAUGGCCdTdT | | 3163 | GUUUUUAUdTdT | |
| D- | S- | AACCCUGUAUGG | 1249 | A- | UUAAGUGCCAU | 1080 |
| 2905 | 3164 | CACUUACdTdT | | 3164 | ACAGGGUUdTdT | |
| D- | S- | ACCCUGUAUGGC | 1250 | A- | UAUAAGUGCCA | 1081 |
| 2906 | 3165 | ACUUAUCdTdT | | 3165 | UACAGGGUdTdT | |
| D- | S- | GAGGCUAUUAAA | 1251 | A- | UGAUUCUUUUA | 1082 |
| 2907 | 3166 | AGAAUCCdTdT | | 3166 | AUAGCCUCdTdT | |
| D- | S- | AAAGAAUCCAAA | 1252 | A- | UUUUGAAUUUG | 1083 |
| 2908 | 3167 | UUCAAACdTdT | | 3167 | GAUUCUUUdTdT | |
| D- | S- | GAAUCCAAAUUC | 1253 | A- | UUAGUUUGAAU | 1084 |
| 2909 | 3168 | AAACUACdTdT | | 3168 | UUGGAUUCdTdT | |

[0378] In other embodiments, the siRNA molecules of the present invention targeting SOD1 can be encoded in plasmid vectors, AAV particles, viral genome or other nucleic acid expression vectors for delivery to a cell.

[0379] DNA expression plasmids can be used to stably express the siRNA duplexes or dsRNA of the present invention targeting SOD1 in cells and achieve long-term inhibition of the target gene expression. In one aspect, the sense and antisense strands of a siRNA duplex are typically linked by a short spacer sequence leading to the expression of a stem-loop structure termed short hairpin RNA (shRNA). The hairpin is recognized and cleaved by Dicer, thus generating mature siRNA molecules.

[0380] According to the present invention, AAV particles comprising the nucleic acids encoding the siRNA molecules targeting SOD1 mRNA are produced, the AAV serotypes may be any of the serotypes listed in Table 1. Non-limiting examples of the AAV serotypes include, AAV1, AAV2, AAV3, AAV4, AAV5, AAV6, AAV7, AAV8, AAV9, AAV9.47, AAV9(hu14), AAV10, AAV11, AAV12, AAVrh8, AAVrh10, AAV-DJ8, AAV-DJ, AAV-PHP.A, and/or AAV-PHP.B, AAVPHP.B2, AAVPHP.B3, AAVPHP.N/PHP.B-DGT, AAVPHP.B-EST, AAVPHP.B-GGT, AAVPHP.B-ATP, AAVPHP.B-ATT-T, AAVPHP.B-DGT-T, AAVPHP.B-GGT-T, AAVPHP.B-SGS, AAVPHP.B-AQP, AAVPHP.B-QQP, AAVPHP.B-SNP(3), AAVPHP.B-SNP, AAVPHP.B-QGT, AAVPHP.B-NQT, AAVPHP.B-EGS, AAVPHP.B-SGN, AAVPHP.B-EGT, AAVPHP.B-DST, AAVPHP.B-DST, AAVPHP.B-STP, AAVPHP.B-PQP, AAVPHP.B-SQP, AAVPHP.B-QLP, AAVPHP.B-TMP, AAVPHP.B-TTP, AAVPHP.S/G2A12, AAVG2A15/G2A3, AAVG2B4, AAVG2B5, and variants thereof.

[0381] In some embodiments, the siRNA duplexes or encoded dsRNA of the present invention suppress (or degrade) SOD1 mRNA. Accordingly, the siRNA duplexes or encoded dsRNA can be used to substantially inhibit SOD1 gene expression in a cell. In some aspects, the inhibition of SOD1 gene expression refers to an inhibition by at least about 20%, preferably by at least about 30%, 40%, 50%, 60%, 70%, 80%, 85%, 90%, 95% and 100%, or at least 20-30%, 20-40%, 20-50%, 20-60%, 20-70%, 20-80%, 20-90%, 20-95%, 20-100%, 30-40%, 30-50%, 30-60%, 30-70%, 30-80%, 30-90%, 30-95%, 30-100%, 40-50%, 40-60%, 40-70%, 40-80%, 40-90%, 40-95%, 40-100%, 50-60%, 50-70%, 50-80%, 50-90%, 50-95%, 50-100%, 60-70%, 60-80%, 60-90%, 60-95%, 60-100%, 70-80%, 70-90%, 70-95%, 70-100%, 80-90%, 80-95%, 80-100%, 90-95%, 90-100% or 95-100%. Accordingly, the protein product of the targeted gene may be inhibited by at least about 20%, preferably by at least about 30%, 40%, 50%, 60%, 70%, 80%, 85%, 90%, 95% and 100%, or at least 20-30%, 20-40%, 20-50%, 20-60%, 20-70%, 20-80%, 20-90%, 20-95%, 20-100&% 30-40&% 30-50&% 30-60%, 30-70%, 30-80%, 30-90%, 30-95%, 30-100%, 40-50%, 40-60%, 40-70%, 40-80%, 40-90%, 40-95%, 40-100%, 50-60%, 50-70%, 50-80%, 50-90%, 50-95%, 50-100%, 60-70%, 60-80%, 60-90%, 60-95%, 60-100%, 70-80%, 70-90%, 70-95%, 70-100%, 80-90%, 80-95%, 80-100%, 90-95%, 90-100% or 95-100%.

[0382] According to the present invention, the siRNA molecules are designed and tested for their ability in reducing SOD1 mRNA levels in cultured cells. Such siRNA molecules may form a duplex such as, but not limited to, include those listed in Table 4. As a non-limiting example, the siRNA duplexes may be siRNA duplex IDs: D-2741 to D-2909.

[0383] In one embodiment, the siRNA molecules comprise a miRNA seed match for SOD1 located in the guide strand. In another embodiment, the siRNA molecules comprise a miRNA seed match for SOD1 located in the passenger strand. In yet another embodiment, the siRNA duplexes or encoded dsRNA targeting SOD1 gene do not comprise a seed match for SOD1 located in the guide or passenger strand.

[0384] In one embodiment, the siRNA duplexes or encoded dsRNA targeting SOD1 gene may have almost no significant full-length off target effects for the guide strand. In another embodiment, the siRNA duplexes or encoded dsRNA targeting SOD1 gene may have almost no significant full-length off target effects for the passenger strand. The siRNA duplexes or encoded dsRNA targeting SOD1 gene may have less than 1%, 2%, 3%, 4%, 5%, 6%, 7%, 8%, 9%, 10%, 11%, 12%, 13%, 14%, 15%, 20%, 25%, 30%, 35%, 40%, 45%, 50%, 1-5%, 2-6%, 3-7%, 4-8%, 5-9%, 5-10%, 6-10%, 5-15%, 5-20%, 5-25% 5-30%, 10-20%, 10-30%, 10-40%, 10-50%, 15-30%, 15-40%, 15-45%, 20-40%, 20-50%, 25-50%, 30-40%, 30-50%, 35-50%, 40-50%, 45-50% full-length off target effects for the passenger strand. In yet another embodiment, the siRNA duplexes or encoded dsRNA targeting SOD1 gene may have almost no significant full-length off target effects for the guide strand or the passenger strand. The siRNA duplexes or encoded dsRNA targeting SOD1 gene may have less than 1%, 2%, 3%, 4%, 5%, 6%, 7%, 8%, 9%, 10%,11%, 12&% 13%, 14%, 15/& 20%, 25%, 30&% 35%, 40%, 45& 50%, 1-5%, 2-6%, 3-7%, 4-8%, 5-9%, 5-10%, 6-10%, 5-15%, 5-20%, 5-25% 5-30%, 10-20%, 10-30%, 10-40%, 10-50%, 15-30%, 15-40%, 15-45%, 20-40%, 20-50%, 25-50%, 30-40%, 30-50%, 35-50%, 40-50%, 45-50% full-length off target effects for the guide or passenger strand.

[0385] In one embodiment, the siRNA duplexes or encoded dsRNA targeting SOD1 gene may have high activity in vitro. In another embodiment, the siRNA molecules may have low activity in vitro. In yet another embodiment, the siRNA duplexes or dsRNA targeting the SOD1 gene may have high guide strand activity and low passenger strand activity in vitro.

[0386] In one embodiment, the siRNA molecules targeting SOD1 have a high guide strand activity and low passenger strand activity in vitro. The target knock-down (KD) by the guide strand may be at least 40%, 50%, 60%, 65%, 70%, 75%, 80%, 85%, 90%, 95%, 99%, 99.5% or 100%. The target knock-down by the guide strand may be 40-50%, 45-50%, 50-55%, 50-60%, 60-65%, 60-70%, 60-75%, 60-80%, 60-85%, 60-90%, 60-95%, 60-99%, 60-99.5%, 60-100%, 65-70%, 65-75%, 65-80%, 65-85%, 65-90%, 65-95%, 65-99%, 65-99.5%, 65-100%, 70-75%, 70-80%, 70-85%, 70-90%, 70-95%, 70-99%, 70-99.5%, 70-100%, 75-80%, 75-85%, 75-90%, 75-95%, 75-99%, 75-99.5%, 75-100%, 80-85%, 80-90%, 80-95%, 80-99%, 80-99.5%, 80-100%, 85-90%, 85-95%, 85-99%, 85-99.5%, 85-100%, 90-95%, 90-99%, 90-99.5%, 90-100%, 95-99%, 95-99.5%, 95-100%, 99-99.5%, 99-100% or 99.5-100%, As a non-limiting example, the target knock-down (KD) by the guide strand is greater than 70%. As a non-limiting example, the target knock-down (KD) by the guide strand is greater than 60%.

[0387] In one embodiment, the siRNA duplex target SOD1 is designed so there is no miRNA seed match for the sense or antise sequence to the non-SOD1 sequence.

[0388] In one embodiment, the IC₅₀ of the guide strand in the siRNA duplex targeting SOD1 for the nearest off target is greater than 100 multiplied by the IC₅₀ of the guide strand for the on-target gene, SOD1. As a non-limiting example, if the IC₅₀ of the guide strand for the nearest off target is greater than 100 multiplied by the IC₅₀ of the guide strand for the target then the siRNA molecules is said to have high guide strand selectivity for inhibiting SOD1 in vitro.

[0389] In one embodiment, the 5′ processing of the guide strand of the siRNA duplex targeting SOD1 has a correct start (n) at the 5′ end at least 75%, 80%, 85%, 90%, 95%, 99% or 100% of the time in vitro or in vivo. As a non-limiting example, the 5′ processing of the guide strand is precise and has a correct start (n) at the 5′ end at least 99% of the time in vitro. As a non-limiting example, the 5′ processing of the guide strand is precise and has a correct start (n) at the 5′ end at least 99% of the time in vivo. As a non-limiting example, the 5′ processing of the guide strand is precise and has a correct start (n) at the 5′ end at least 90% of the time in vitro. As a non-limiting example, the 5′ processing of the guide strand is precise and has a correct start (n) at the 5′ end at least 90% of the time in vivo. As a non-limiting example, the 5′ processing of the guide strand is precise and has a correct start (n) at the 5′ end at least 85% of the time in vitro. As a non-limiting example, the 5′ processing of the guide strand is precise and has a correct start (n) at the 5′ end at least 85% of the time in vivo.

[0390] In one embodiment, the 5′ processing of the guide strand of the siRNA duplex targeting SOD1 has a correct start (n) at the 5′ end in a range of 75-95°, 75-90%, 75-85%, 75-80%, 80-95%, 80-90%, 80-85%, 85-95%, 85-90%, or 90-95%. As a non-limiting example, the 5′ processing of the guide strand of the siRNA duplex targeting SOD1 has a correct start (n) at the 5′ end in a range of 75-95%.

[0391] In one embodiment, the 5′ processing of the guide strand of the siRNA duplex targeting SOD1 has a correct start (n) at the 5′ end for 75%, 75.1%, 75.2%, 75.3%, 75.4%, 75.5%, 75.6%, 75.7%, 75.8%, 75.9%, 76%, 76.1%, 76.2%, 76.3%, 76.4%, 76.5%, 76.6%, 76.7%, 76.8%, 76.9%, 77%, 77.1%, 77.2%, 77.3%, 77.4%, 77.5%, 77.6%, 77.7%, 77.8%, 77.9%, 78%, 78.1%, 78.2%, 78.3%, 78.4%, 78.5%, 78.6%, 78.7%, 78.8%, 78.9%, 79%, 79.1%, 79.2%, 79.3%, 79.4%, 79.5%, 79.6%, 79.7%, 79.8%, 79.9%, 80%, 80.1%, 80.2%, 80.3%, 80.4%, 80.5° %, 80.6%, 80.7° %, 80.8° %, 80.9%, 81%, 81.1%, 81.2%, 81.3%, 81.4%, 81.50%, 81.6%, 81.7%, 81.8%, 81.9%, 82%, 82.1%, 82.2%, 82.3%, 82.4%, 82.5%, 82.6%, 82.7%, 82.8%, 82.9%, 83%, 83.1%, 83.2%, 83.3%, 83.4%, 83.5%, 83.6%, 83.7%, 83.8%, 83.9%, 84%, 84.1%, 84.2%, 84.3%, 84.4%, 84.5%, 84.6%, 84.7%, 84.8%, 84.9%, 85%, 85.1%, 85.2%, 85.3%, 85.4%, 85.5%, 85.6%, 85.7%, 85.8%, 85.9%, 86%, 86.1%, 86.2% 86.3%, 86.4%, 86.5%, 86.6%, 86.7%, 86.8%, 86.9%, 87%, 87.1%, 87.2%, 87.3%, 87.4%, 87.5%, 87.6%, 87.7%, 87.8%, 87.9%, 88%, 88.1%, 88.2%, 88.3%, 88.4%, 88.5%, 88.6%, 88.7%, 88.8%, 88.9%, 89%, 89.1%, 89.2%, 89.3%, 89.4%, 89.5%, 89.6%, 89.7%, 89.8%, 89.9%, 90%, 90.1%, 90.2%, 90.3%, 90.4% 90.5%, 90.6%, 90.7%, 90.8%, 90.9%, 91%, 91.1%, 91.2%, 91.3% 91.4%, 91.5%, 91.6%, 91.7%, 91.8%, 91.9%, 92%, 92.1%, 92.2%, 92.3%, 92.4%, 92.5%, 92.6%, 92.7%, 92.8%, 92.9%, 93%, 93.1%, 93.2%, 93.3%, 93.4%, 93.5%, 93.6%, 93.7%, 93.8%, 93.9%, 94%, 94.1%, 94.2%, 94.3%, 94.4%, 94.5%, 94.6%, 94.7%, 94.8%, 94.9%, or 95% of the constructs expressed. As a non-limiting example, the 5′ processing of the guide strand of the siRNA duplex targeting SOD1 has a correct start (n) at the 5′ end for 81% of the constructs expressed. As a non-limiting example, the 5′ processing of the guide strand of the siRNA duplex targeting SOD1 has a correct start (n) at the 5′ end for 90% of the constructs expressed.

[0392] In one embodiment, a passenger-guide strand duplex for SOD1 is considered effective when the pri- or pre-microRNAs demonstrate, by methods known in the art and described herein, greater than 2-fold guide to passenger strand ratio when processing is measured. As a non-limiting examples, the pri- or pre-microRNAs demonstrate great than 2-fold, 3-fold, 4-fold, 5-fold, 6-fold, 7-fold, 8-fold, 9-fold, 10-fold, 11-fold, 12-fold, 13-fold, 14-fold, 15-fold, or 2 to 5-fold, 2 to 10-fold, 2 to 15-fold, 3 to 5-fold, 3 to 10-fold, 3 to 15-fold, 4 to 5-fold, 4 to 10-fold, 4 to 15-fold, 5 to 10-fold, 5 to 15-fold, 6 to 10-fold, 6 to 15-fold, 7 to 10-fold, 7 to 15-fold, 8 to 10-fold, 8 to 15-fold, 9 to 10-fold, 9 to 15-fold, 10 to 15-fold, 11 to 15-fold, 12 to 15-fold, 13 to 15-fold, or 14 to 15-fold guide to passenger strand ratio when processing is measured.

[0393] In one embodiment, the siRNA molecules may be used to silence wild type or mutant SOD1 by targeting at least one exon on the SOD1 sequence. The exon may be exon 1, exon 2, exon 3, exon 4, exon 5, exon 6, exon 7, exon 8, exon 9, exon 10, exon 11, exon 12, exon 13, exon 14, exon 15, exon 16, exon 17, exon 18, exon 19, exon 20, exon 21, exon 22, exon 23, exon 24, exon 25, exon 26, exon 27, exon 28, exon 29, exon 30, exon 31, exon 32, exon 33, exon 34, exon 35, exon 36, exon 37, exon 38, exon 39, exon 40, exon 41, exon 42, exon 43, exon 44, exon 45, exon 46, exon 47, exon 48, exon 49, exon 50, exon 51, exon 52, exon 53, exon 54, exon 55, exon 56, exon 57, exon 58, exon 59, exon 60, exon 61, exon 62, exon 63, exon 64, exon 65, exon 66, and/or exon 67.

[0394] In one embodiment, the range of guide strands to the total endogenous pool of miRNAs is 0.001-0.6%, 0.005-0.6%, 0.01-0.6%, 0.015-0.6%, 0.02-0.6%, 0.025-0.6%, 0.03-0.6%, 0.035-0.6%, 0.04-0.6%, 0.045-0.6%, 0.05-0.6%, 0.055-0.6%, 0.06-0.6%, 0.065-0.6%, 0.07-0.6%, 0.075-0.6%, 0.08-0.6%, 0.085-0.6%, 0.09-0.6%, 0.095-0.60%, 0.1-0.6%, 0.15-0.6%, 0.2-0.6%, 0.25-0.6%, 0.3-0.6%, 0.35-0.6%, 0.4-0.6%, 0.45-0.6%, 0.5-0.6%, 0.55-0.6%, 0.001-0.50%, 0.005-0.5%, 0.01-0.5%, 0.015-0.5%, 0.02-0.5%, 0.025-0.5%, 0.03-0.5%, 0.035-0.5%, 0.04-0.5%, 0.045-0.5%, 0.05-0.5%, 0.055-0.5%, 0.06-0.5%, 0.065-0.5%, 0.07-0.5%, 0.075-0.5%, 0.08-0.5%, 0.085-0.5%, 0.09-0.5%, 0.095-0.5%, 0.1-0.5%, 0.15-0.5%, 0.2-0.5%, 0.25-0.5%, 0.3-0.5%, 0.35-0.5%, 0.4-0.5%, 0.45-0.5%, 0.001-0.4%, 0.005-0.4%, 0.01-0.4%, 0.015-0.4%, 0.02-0.4%, 0.025-0.4%, 0.03-0.4%, 0.035-0.4%, 0.04-0.4%, 0.045-0.4%, 0.05-0.4%, 0.055-0.4%, 0.06-0.4%, 0.065-0.4%, 0.07-0.4%, 0.075-0.4%, 0.08-0.4%, 0.085-0.4%, 0.09-0.4%, 0.095-0.4%, 0.1-0.4%, 0.15-0.4%, 0.2-0.4%, 0.25-0.4%, 0.3-0.4%, 0.35-0.4%, 0.001-0.30%, 0.005-0.3%, 0.01-0.3%, 0.015-0.3%, 0.02-0.3%, 0.025-0.3%, 0.03-0.3%, 0.035-0.3&% 0.04-0.3%, 0.045-0.3%, 0.05-0.3%, 0.055-0.3%, 0.06-0.3%, 0.065-0.3%, 0.07-0.3%, 0.075-0.3%, 0.08-0.3%, 0.085-0.3%, 0.09-0.3%, 0.095-0.3%, 0.1-0.3%, 0.15-0.3%, 0.2-0.3%, 0.25-0.3%, 0.001-0.2%, 0.005-0.2%, 0.01-0.2%, 0.015-0.2%, 0.02-0.2%, 0.025-0.2%, 0.03-0.2%, 0.035-0.2%, 0.04-0.2%, 0.045-0.2%, 0.05-0.2%, 0.055-0.2%, 0.06-0.2%, 0.065-0.2%, 0.07-0.2%, 0.075-0.2%, 0.08-0.2%, 0.085-0.2%, 0.09-0.2%, 0.095-0.2%, 0.1-0.2%, 0.15-0.2%, 0.001-0.1%, 0.005-0.1%, 0.01-0.1%, 0.015-0.1%, 0.02-0.1%, 0.025-0.1%, 0.03-0.1%, 0.035-0.1%, 0.04-0.1%, 0.045-0.1%, 0.05-0.1%, 0.055-0.1%, 0.06-0.1%, 0.065-0.1%, 0.07-0.1%, 0.075-0.1%, 0.08-0.1%, 0.085-0.10& 0.09-0.1%, or 0.095-0.1%. As a non-limiting example, the range is 0.06-0.6%. As a non-limiting example, the range is 0.4-0.5%.

[0395] In one embodiment, the percent of guide strands to the total endogenous pool of miRNAs is 0.001%, 0.002%, 0.003%, 0.004%, 0.005%, 0.006%, 0.007%, 0.008%, 0.009%, 0.01%, 0.02%, 0.03%, 0.04%, 0.05%, 0.06%, 0.07%, 0.08%, 0.09%, 0.1%, 0.2%, 0.3%, 0.4%, 0.5%, or 0.6%. As a non-limiting example, the percent is 0.06%. As a non-limiting example, the percent is 0.4%. As a non-limiting example, the percent is 0.5%.

siRNA Modification

[0396] In some embodiments, the siRNA molecules of the present invention, when not delivered as a precursor or DNA, may be chemically modified to modulate some features of RNA molecules, such as, but not limited to, increasing the stability of siRNAs in vivo. The chemically modified siRNA molecules can be used in human therapeutic applications, and are improved without compromising the RNAi activity of the siRNA molecules. As a non-limiting example, the siRNA molecules modified at both the 3′ and the 5′ end of both the sense strand and the antisense strand.

[0397] In some aspects, the siRNA duplexes of the present invention may contain one or more modified nucleotides such as, but not limited to, sugar modified nucleotides, nucleobase modifications and/or backbone modifications. In some aspects, the siRNA molecule may contain combined modifications, for example, combined nucleobase and backbone modifications.

[0398] In one embodiment, the modified nucleotide may be a sugar-modified nucleotide. Sugar modified nucleotides include, but are not limited to 2′-fluoro, 2′-amino and 2′-thio modified ribonucleotides, e.g. 2′-fluoro modified ribonucleotides. Modified nucleotides may be modified on the sugar moiety, as well as nucleotides having sugars or analogs thereof that are not ribosyl. For example, the sugar moieties may be, or be based on, mannoses, arabinoses, glucopyranoses, galactopyranoses, 4′-thioribose, and other sugars, heterocycles, or carbocycles.

[0399] In one embodiment, the modified nucleotide may be a nucleobase-modified nucleotide.

[0400] In one embodiment, the modified nucleotide may be a backbone-modified nucleotide. In some embodiments, the siRNA duplexes of the present invention may further comprise other modifications on the backbone. A normal “backbone”, as used herein, refers to the repeating alternating sugar-phosphate sequences in a DNA or RNA molecule. The deoxyribose/ribose sugars are joined at both the 3′-hydroxyl and 5′-hydroxyl groups to phosphate groups in ester links, also known as “phosphodiester” bonds/linker (PO linkage). The PO backbones may be modified as “phosphorothioate backbone (PS linkage). In some cases, the natural phosphodiester bonds may be replaced by amide bonds but the four atoms between two sugar units are kept. Such amide modifications can facilitate the solid phase synthesis of oligonucleotides and increase the thermodynamic stability of a duplex formed with siRNA complement. See e.g. Mesmaeker et al., Pure & Appl. Chem., 1997, 3, 437-440: the content of which is incorporated herein by reference in its entirety.

[0401] Modified bases refer to nucleotide bases such as, for example, adenine, guanine, cytosine, thymine, uracil, xanthine, inosine, and queuosine that have been modified by the replacement or addition of one or more atoms or groups. Some examples of modifications on the nucleobase moieties include, but are not limited to, alkylated, halogenated, thiolated, aminated, amidated, or acetylated bases, individually or in combination. More specific examples include, for example, 5-propynyluridine, 5-propynylcytidine, 6-methyladenine, 6-methylguanine, N,N-dimethyladenine, 2-propyladenine, 2-propylguanine, 2-aminoadenine, 1-methylinosine, 3-methyluridine, 5-methylcytidine, 5-methyluridine and other nucleotides having a modification at the 5 position, 5-(2-amino)propyl uridine, 5-halocytidine, 5-halouridine, 4-acetylcytidine, 1-methyladenosine, 2-methyladenosine, 3-methylcytidine, 6-methyluridine, 2-methylguanosine, 7-methylguanosine, 2,2-dimethylguanosine, 5-methylaminoethyluridine, 5-methyloxyuridine, deazanucleotides such as 7-deaza-adenosine, 6-azouridine, 6-azocytidine, 6-azothymidine, 5-methyl-2-thiouridine, other thio bases such as 2-thiouridine and 4-thiouridine and 2-thiocytidine, dihydrouridine, pseudouridine, queuosine, archaeosine, naphthyl and substituted naphthyl groups, any O- and N-alkylated purines and pyrimidines such as N6-methyladenosine, 5-methylcarbonylmethyluridine, uridine 5-oxyacetic acid, pyridine-4-one, pyridine-2-one, phenyl and modified phenyl groups such as aminophenol or 2,4,6-trimethoxy benzene, modified cytosines that act as G-clamp nucleotides, 8-substituted adenines and guanines, 5-substituted uracils and thymines, azapyrimidines, carboxyhydroxyalkyl nucleotides, carboxyalkylaminoalkyl nucleotides, and alkylcarbonylalkylated nucleotides.

[0402] In one embodiment, the modified nucleotides may be on just the sense strand.

[0403] In another embodiment, the modified nucleotides may be on just the antisense strand.

[0404] In some embodiments, the modified nucleotides may be in both the sense and antisense strands.

[0405] In some embodiments, the chemically modified nucleotide does not affect the ability of the antisense strand to pair with the target mRNA sequence.

[0406] In one embodiment, the AAV particle comprising a nucleic acid sequence encoding the siRNA molecules of the present invention may encode siRNA molecules which are polycistronic molecules. The siRNA molecules may additionally comprise one or more linkers between regions of the siRNA molecules.

### Molecular Scaffold

[0407] In one embodiment, the siRNA molecules may be encoded in a modulatory polynucleotide which also comprises a molecular scaffold. As used herein a “molecular scaffold” is a framework or starting molecule that forms the sequence or structural basis against which to design or make a subsequent molecule.

[0408] In one embodiment, the molecular scaffold comprises at least one 5′ flanking region. As a non-limiting example, the 5′ flanking region may comprise a 5′ flanking sequence which may be of any length and may be derived in whole or in part from wild type microRNA sequence or be a completely artificial sequence.

[0409] In one embodiment, the molecular scaffold comprises at least one 3′ flanking region. As a non-limiting example, the 3′ flanking region may comprise a 3′ flanking sequence which may be of any length and may be derived in whole or in part from wild type microRNA sequence or be a completely artificial sequence.

[0410] In one embodiment, the molecular scaffold comprises at least one loop motif region. As a non-limiting example, the loop motif region may comprise a sequence which may be of any length.

[0411] In one embodiment, the molecular scaffold comprises a 5′ flanking region, a loop motif region and/or a 3′ flanking region.

[0412] In one embodiment, at least one siRNA, miRNA or other RNAi agent described herein, may be encoded by a modulatory polynucleotide which may also comprise at least one molecular scaffold. The molecular scaffold may comprise a 5′ flanking sequence which may be of any length and may be derived in whole or in part from wild type microRNA sequence or be completely artificial. The 3′ flanking sequence may mirror the 5′ flanking sequence and/or a 3′ flanking sequence in size and origin. Either flanking sequence may be absent. The 3′ flanking sequence may optionally contain one or more CNNC motifs, where “N” represents any nucleotide.

[0413] Forming the stem of a stem loop structure is a minimum of the modulatory polynucleotide encoding at least one siRNA, miRNA or other RNAi agent described herein. In some embodiments, the siRNA, miRNA or other RNAi agent described herein comprises at least one nucleic acid sequence which is in part complementary or will hybridize to a target sequence. In some embodiments the payload is an siRNA molecule or fragment of an siRNA molecule.

[0414] In some embodiments, the 5′ arm of the stem loop structure of the modulatory polynucleotide comprises a nucleic acid sequence encoding a sense sequence. Non-limiting examples of sense sequences, or fragments or variants thereof, which may be encoded by the modulatory polynucleotide are described in Table 3.

[0415] In some embodiments, the 3′ arm of the stem loop of the modulatory polynucleotide comprises a nucleic acid sequence encoding an antisense sequence. The antisense sequence, in some instances, comprises a “G” nucleotide at the 5′ most end. Non-limiting examples of antisense sequences, or fragments or variants thereof, which may be encoded by the modulatory polynucleotide are described in Table 2.

[0416] In other embodiments, the sense sequence may reside on the 3′ arm while the antisense sequence resides on the 5′ arm of the stem of the stem loop structure of the modulatory polynucleotide. Non-limiting examples of sense and antisense sequences which may be encoded by the modulatory polynucleotide are described in Tables 2 and 3.

[0417] In one embodiment, the sense and antisense sequences may be completely complementary across a substantial portion of their length. In other embodiments the sense sequence and antisense sequence may be at least 70, 80, 90, 95 or 99% complementarity across independently at least 50, 60, 70, 80, 85, 90, 95, or 99% of the length of the strands.

[0418] Neither the identity of the sense sequence nor the homology of the antisense sequence need to be 100% complementarity to the target sequence.

[0419] In one embodiment, separating the sense and antisense sequence of the stem loop structure of the modulatory polynucleotide is a loop sequence (also known as a loop motif, linker or linker motif). The loop sequence may be of any length, between 4-30 nucleotides, between 4-20 nucleotides, between 4-15 nucleotides, between 5-15 nucleotides, between 6-12 nucleotides, 6 nucleotides, 7 nucleotides, 8 nucleotides, 9 nucleotides, 10 nucleotides, 11 nucleotides, 12 nucleotides, 13 nucleotides, 14 nucleotides, and/or 15 nucleotides.

[0420] In some embodiments, the loop sequence comprises a nucleic acid sequence encoding at least one UGUG motif. In some embodiments, the nucleic acid sequence encoding the UGUG motif is located at the 5′ terminus of the loop sequence.

[0421] In one embodiment, spacer regions may be present in the modulatory polynucleotide to separate one or more modules (e.g., 5′ flanking region, loop motif region, 3′ flanking region, sense sequence, antisense sequence) from one another. There may be one or more such spacer regions present.

[0422] In one embodiment, a spacer region of between 8-20, i.e., 8, 9, 10, 11, 12, 13, 14, 15, 16, 17, 18, 19, or 20 nucleotides may be present between the sense sequence and a flanking region sequence.

[0423] In one embodiment, the length of the spacer region is 13 nucleotides and is located between the 5′ terminus of the sense sequence and the 3′ terminus of the flanking sequence. In one embodiment, a spacer is of sufficient length to form approximately one helical turn of the sequence.

[0424] In one embodiment, a spacer region of between 8-20, i.e., 8, 9, 10, 11, 12, 13, 14, 15, 16, 17, 18, 19, or 20 nucleotides may be present between the antisense sequence and a flanking sequence.

[0425] In one embodiment, the spacer sequence is between 10-13, i.e., 10, 11, 12 or 13 nucleotides and is located between the 3′ terminus of the antisense sequence and the 5′ terminus of a flanking sequence. In one embodiment, a spacer is of sufficient length to form approximately one helical turn of the sequence.

[0426] In one embodiment, the molecular scaffold of the modulatory polynucleotide comprises in the 5′ to 3′ direction, a 5′ flanking sequence, a 5′ arm, a loop motif, a 3′ arm and a 3′ flanking sequence. As a non-limiting example, the 5′ arm may comprise a nucleic acid sequence encoding a sense sequence and the 3′ arm comprises a nucleic acid sequence encoding the antisense sequence. In another non-limiting example, the 5′ arm comprises a nucleic acid sequence encoding the antisense sequence and the 3′ arm comprises a nucleic acid sequence encoding the sense sequence.

[0427] In one embodiment, the 5′ arm, sense and/or antisense sequence, loop motif and/or 3′ arm sequence may be altered (e.g., substituting 1 or more nucleotides, adding nucleotides and/or deleting nucleotides). The alteration may cause a beneficial change in the function of the construct (e.g., increase knock-down of the target sequence, reduce degradation of the construct, reduce off target effect, increase efficiency of the payload, and reduce degradation of the payload).

[0428] In one embodiment, the molecular scaffold of the modulatory polynucleotides is aligned in order to have the rate of excision of the guide strand (also referred to herein as the antisense strand) be greater than the rate of excision of the passenger strand (also referred to herein as the sense strand). The rate of excision of the guide or passenger strand may be, independently, 1%, 2%, 3%, 4%, 5%, 10%, 15%, 20%, 25%, 30%, 35%, 40%, 45%, 50%, 55%, 60%, 65%, 70%, 75%, 80%, 85%, 90%, 95%, 99% or more than 99%. As a non-limiting example, the rate of excision of the guide strand is at least 80%. As another non-limiting example, the rate of excision of the guide strand is at least 90%.

[0429] In one embodiment, the rate of excision of the guide strand is greater than the rate of excision of the passenger strand. In one aspect, the rate of excision of the guide strand may be at least 1%, 2%, 3%, 4%, 5%, 10%, 15%, 20%, 25%, 30%, 35%, 40%, 45%, 50%, 55%, 60%, 65%, 70%, 75%, 80%, 85%, 90%, 95%, 99% or more than 99% greater than the passenger strand.

[0430] In one embodiment, the efficiency of excision of the guide strand is at least 60%, 65%, 70%, 75%, 80%, 85%, 90%, 95%, 99% or more than 99%. As a non-limiting example, the efficiency of the excision of the guide strand is greater than 80%.

[0431] In one embodiment, the efficiency of the excision of the guide strand is greater than the excision of the passenger strand from the molecular scaffold. The excision of the guide strand may be 2, 3, 4, 5, 6, 7, 8, 9, 10 or more than 10 times more efficient than the excision of the passenger strand from the molecular scaffold.

[0432] In one embodiment, the molecular scaffold comprises a dual-function targeting modulatory polynucleotide. As used herein, a “dual-function targeting” modulatory polynucleotide is a polynucleotide where both the guide and passenger strands knock down the same target or the guide and passenger strands knock down different targets.

[0433] In one embodiment, the molecular scaffold of the modulatory polynucleotides described herein may comprise a 5′ flanking region, a loop motif region and a 3′ flanking region. Non-limiting examples of the sequences for the 5′ flanking region, loop motif region (may also be referred to as a linker region) and the 3′ flanking region which may be used, or fragments thereof used, in the modulatory polynucleotides described herein are shown in Tables 5-7.

TABLE 5
5′ Flanking, Regions for Molecular Scaffold

| 5′ | | 5′ |
|---|---|---|
| Flanking | | Flanking |
| Region | | Region |
| Name | 5′ Flanking Region Sequence | SEQ ID |
| 5F1 | GTGCTGGGCGGGGGGCGGCGGGCCCTCCCGC | 1255 |
| | AGAACACCATGCGCTCTTCGGAA | |
| 5F2 | GAAGCAAAGAAGGGGCAGAGGGAGCCCGTG | 1256 |
| | AGCTGAGTGGGCCAGGGACTGGGAGAAGGAG | |
| | TGAGGAGGCAGGGCCGGCATGCCTCTGCTGC | |
| | TGGCCAGA | |
| 5F3 | GTGCTGGGCGGGGGGCGGCGGGCCCTCCCGC | 1257 |
| | AGAACACCATGCGCTCCACGGAA | |
| 5F4 | GGGCCCTCCCGCAGAACACCATGCGCTCCAC | 1258 |
| | GGAA | |
| 5F5 | CTCCCGCAGAACACCATGCGCTCCACGGAA | 1259 |
| 5F6 | GTGCTGGGCGGGGGGCGGCGGGCCCTCCCGC | 1260 |
| | AGAACACCATGCGCTCCACGGAAG | |
| 5F7 | GTGCTGGGCGGGGGGCGGCGGGCCCTCCCGC | 1261 |
| | AGAACACCATGCGCTCCTCGGAA | |
| 5F8 | TTTATGCCTCATCCTCTGAGTGCTGAAGGCTT | 1262 |
| | GCTGTAGGCTGTATGCTG | |
| 5F9 | GTGCTGGGCGGGGGGCGGCGGGCCCTCCCGC | 1263 |
| | AGAACACCATGCGCTCTTCGGGA | |

TABLE 6
Loop Motif Regions for Molecular Scaffold

| Loop | | Loop |
|---|---|---|
| Motif | | Motif |
| Region | Loop Motif | Region |
| Name | Region Sequence | SEQ ID |
| L1 | TGTGACCTGG | 1264 |
| L2 | TGTGATTTGG | 1265 |
| L3 | GTCTGCACCTGTCACTAG | 1266 |
| L4 | GTGACCCAAG | 1267 |
| L5 | GTGGCCACTGAGAAG | 1268 |
| L6 | GTGACCCAAT | 1269 |
| L7 | GTGACCCAAC | 1270 |
| L8 | GTGGCCACTGAGAAA | 1271 |
| L9 | TATAATTTGG | 1272 |
| L10 | CCTGACCCAGT | 1273 |

TABLE 7
3′ Flanking Regions for Molecular Scaffold

| 3′ | | 3′ |
|---|---|---|
| Flanking | | Flanking |
| Region | | Region |
| Name | 3′ Flanking Region Sequence | SEQ ID |
| 3F1 | CTGAGGAGCGCCTTGACAGCAGCCATGGGAG | 1274 |
| | GGCCGCCCCCTACCTCAGTGA | |
| 3F2 | CTGTGGAGCGCCTTGACAGCAGCCATGGGAG | 1275 |
| | GGCCGCCCCCTACCTCAGTGA | |
| 3F3 | TGGCCGTGTAGTGCTACCCAGCGCTGGCTGCC | 1276 |
| | TCCTCAGCATTGCAATTCCTCTCCCATCTGGG | |
| | CACCAGTCAGCTACCCTGGTGGGAATCTGGGT | |
| | AGCC | |
| 3F4 | CTGAGGAGCGCCTTGACAGCAGCCATGGGAG | 1277 |
| | GGCC | |
| 3F5 | CTGCGGAGCGCCTTGACAGCAGCCATGGGAG | 1278 |
| | GGCCGCCCCCTACCTCAGTGA | |
| 3F6 | AGTGTATGATGCCTGTTACTAGCATTCACATG | 1279 |
| | GAACAAATTGCTGCCGTG | |
| 3F7 | TCCTGAGGAGCGCCTTGACAGCAGCCATGGG | 1280 |
| | AGGGCCGCCCCCTACCTCAGTGA | |

[0434] In one embodiment, the molecular scaffold may comprise at least one 5′ flanking region, fragment or variant thereof listed in Table 5. As a non-limiting example, the 5′ flanking region may be 5F1, 5F2, 5F3, 5F4, 5F5, 5F6, 5F7, 5F8, or 5F9.

[0435] In one embodiment, the molecular scaffold may comprise at least one 5F1 flanking region.

[0436] In one embodiment, the molecular scaffold may comprise at least one 5F2 flanking region.

[0437] In one embodiment, the molecular scaffold may comprise at least one 5F3 flanking region.

[0438] In one embodiment, the molecular scaffold may comprise at least one 5F4 flanking region.

[0439] In one embodiment, the molecular scaffold may comprise at least one 5F5 flanking region.

[0440] In one embodiment, the molecular scaffold may comprise at least one 5F6 flanking region.

[0441] In one embodiment, the molecular scaffold may comprise at least one 5F7 flanking region.

[0442] In one embodiment, the molecular scaffold may comprise at least one 5F8 flanking region.

[0443] In one embodiment, the molecular scaffold may comprise at least one 5F9 flanking region.

[0444] In one embodiment, the molecular scaffold may comprise at least one loop motif region, fragment or variant thereof listed in Table 6. As a non-limiting example, the loop motif region may be L1, L2, L3, L4, L5, L6, L7, L8, L9, or L10.

[0445] In one embodiment, the molecular scaffold may comprise at least one L1 loop motif region.

[0446] In one embodiment, the molecular scaffold may comprise at least one L2 loop motif region.

[0447] In one embodiment, the molecular scaffold may comprise at least one L3 loop motif region.

[0448] In one embodiment, the molecular scaffold may comprise at least one L4 loop motif region.

[0449] In one embodiment, the molecular scaffold may comprise at least one L5 loop motif region.

[0450] In one embodiment, the molecular scaffold may comprise at least one L6 loop motif region.

[0451] In one embodiment, the molecular scaffold may comprise at least one L7 loop motif region.

[0452] In one embodiment, the molecular scaffold may comprise at least one L8 loop motif region.

[0453] In one embodiment, the molecular scaffold may comprise at least one L9 loop motif region.

[0454] In one embodiment, the molecular scaffold may comprise at least one L10 loop motif region.

[0455] In one embodiment, the molecular scaffold may comprise at least one 3′ flanking region, fragment or variant thereof listed in Table 7. As a non-limiting example, the 3′ flanking region may be 3F1, 3F2, 3F3, 3F4, 3F5, 3F6, or 3F7.

[0456] In one embodiment, the molecular scaffold may comprise at least one 3F1 flanking region.

[0457] In one embodiment, the molecular scaffold may comprise at least one 3F2 flanking region.

[0458] In one embodiment, the molecular scaffold may comprise at least one 3F3 flanking region.

[0459] In one embodiment, the molecular scaffold may comprise at least one 3F4 flanking region.

[0460] In one embodiment, the molecular scaffold may comprise at least one 3F5 flanking region.

[0461] In one embodiment, the molecular scaffold may comprise at least one 3F6 flanking region.

[0462] In one embodiment, the molecular scaffold may comprise at least one 3F7 flanking region.

[0463] In one embodiment, the molecular scaffold may comprise at least one 5′ flanking region, fragment or variant thereof, and at least one loop motif region, fragment or variant thereof, as described in Tables 5 and 6. As a non-limiting example, the 5′ flanking region and the loop motif region may be 5F1 and L1, 5F1 and L2, 5F1 and L3, 5F1 and L4, 5F1 and L5, 5F1 and L6, 5F1 and L7, 5F1 and L8, 5F1 and L9, 5F1 and L0, 5F2 and L1, 5F2 and L2, 5F2 and L3, 5F2 and L4, 5F2 and L5, 5F2 and L6, 5F2 and L7, 5F2 and L8, 5F2 and L9, 5F2 and L10, 5F3 and L1, 5F3 and L2, 5F3 and L3, 5F3 and L4, 5F3 and L5, 5F3 and L6, 5F3 and L7, 5F3 and L8, 5F3 and L9, 5F3 and L10, 5F4 and L1, 5F4 and L2, 5F4 and L3, 5F4 and L4, 5F4 and L5, 5F4 and L6, 5F4 and L7, 5F4 and L8, 5F4 and L9, 5F4 and L10, 5F5 and L1, 5F5 and L2, 5F5 and L3, 5F5 and L4, 5F5 and L5, 5F5 and L6, 5F5 and L7, 5F5 and L8, 5F5 and L9, 5F5 and L10, 5F6 and L1, 5F6 and L2, 5F6 and L3, 5F6 and L5, 5F6 and L5, 5F6 and L6, 5F6 and L7, 5F6 and L8, 5F6 and L9, 5F6 and L10, 5F7 and L1, 5F7 and L2, 5F7 and L3, 5F7 and L4, 5F7 and L5, 5F7 and L6, 5F7 and L7, 5F7 and L8, 5F7 and L9, 5F7 and L0, 5F8 and L1, 5F8 and L2, 5F8 and L3, 5F8 and L4, 5F8 and L5, 5F8 and L6, 5F8 and L7, 5F8 and L8, 5F8 and L9, 5F8 and L10, 5F9 and L1, 5F9 and L2, 5F9 and L3, 5F9 and L4, 5F9 and L5, 5F9 and L6, 5F9 and L7, 5F9 and L8, 5F9 and L9, and 5F9 and L10.

[0464] In one embodiment, the molecular scaffold may comprise at least one 5F2 flanking region and at least one L1 loop motif region.

[0465] In one embodiment, the molecular scaffold may comprise at least one 5F1 flanking region and at least one L4 loop motif region.

[0466] In one embodiment, the molecular scaffold may comprise at least one 5F7 flanking region and at least one L8 loop motif region.

[0467] In one embodiment, the molecular scaffold may comprise at least one 5F3 flanking region and at least one L4 loop motif region.

[0468] In one embodiment, the molecular scaffold may comprise at least one 5F3 flanking region and at least one L5 loop motif region.

[0469] In one embodiment, the molecular scaffold may comprise at least one 5F4 flanking region and at least one L4 loop motif region.

[0470] In one embodiment, the molecular scaffold may comprise at least one 5F3 flanking region and at least one L7 loop motif region.

[0471] In one embodiment, the molecular scaffold may comprise at least one 5F5 flanking region and at least one L4 loop motif region.

[0472] In one embodiment, the molecular scaffold may comprise at least one 5F6 flanking region and at least one L4 loop motif region.

[0473] In one embodiment, the molecular scaffold may comprise at least one 5F3 flanking region and at least one L6 loop motif region.

[0474] In one embodiment, the molecular scaffold may comprise at least one 5F7 flanking region and at least one L4 loop motif region.

[0475] In one embodiment, the molecular scaffold may comprise at least one 5F2 flanking region and at least one L2 loop motif region.

[0476] In one embodiment, the molecular scaffold may comprise at least one 5F1 flanking region and at least one L1 loop motif region.

[0477] In one embodiment, the molecular scaffold may comprise at least one 5F1 flanking region and at least one L2 loop motif region.

[0478] In one embodiment, the molecular scaffold may comprise at least one 3′ flanking region, fragment or variant thereof, and at least one motif region, fragment or variant thereof, as described in Tables 6 and 7. As a non-limiting example, the 3′ flanking region and the loop motif region may be 3F1 and L1, 3F1 and L2, 3F1 and L3, 3F1 and L4, 3F1 and L5, 3F1 and L6, 3F1 and L7, 3F1 and L8, 3F1 and L9, 3F1 and L0, 3F2 and L1, 3F2 and L2, 3F2 and L3, 3F2 and L4, 3F2 and L5, 3F2 and L6, 3F2 and L7, 3F2 and L8, 3F2 and L9, 3F2 and L0, 3F3 and L1, 3F3 and L2, 3F3 and L3, 3F3 and L4, 3F3 and L5, 3F3 and L6, 3F3 and L7, 3F3 and L5, 3F3 and L9, 3F3 and L10, 3F4 and L1, 3F4 and L2, 3F4 and L3, 3F4 and L4, 3F4 and L5, 3F4 and L6, 3F4 and L7, 3F4 and L8, 3F4 and L9, 3F4 and L0, 3F5 and L1, 3F5 and L2, 3F5 and L3, 3F5 and L4, 3F5 and L5, 3F5 and L6, 3F5 and L7, 3F5 and L8, 3F5 and L9, 3F5 and L10, 3F6 and L1, 3F6 and L2, 3F6 and L3, 3F6 and L4, 3F6 and L5, 3F6 and L6, 3F6 and L7, 3F6 and L8, 3F6 and L9, 3F6 and L0, 3F7 and L1, 3F7 and L2, 3F7 and L3, 3F7 and L4, 3F7 and L5, 3F7 and L6, 3F7 and L7, 3F7 and L8, 3F7 and L9, and 3F7 and L10.

[0479] In one embodiment, the molecular scaffold may comprise at least one L1 loop motif region and at least one 3F2 flanking region.

[0480] In one embodiment, the molecular scaffold may comprise at least one L4 loop motif region and at least one 3F1 flanking region.

[0481] In one embodiment, the molecular scaffold may comprise at least one L8 loop motif region and at least one 3F5 flanking region.

[0482] In one embodiment, the molecular scaffold may comprise at least one L5 loop motif region and at least 3F1 flanking region.

[0483] In one embodiment, the molecular scaffold may comprise at least one L4 loop motif region and at least one 3F4 flanking region.

[0484] In one embodiment, the molecular scaffold may comprise at least one L7 loop motif region and at least one 3F1 flanking region.

[0485] In one embodiment, the molecular scaffold may comprise at least one L6 loop motif region and at least one 3F1 flanking region.

[0486] In one embodiment, the molecular scaffold may comprise at least one L4 loop motif region and at least one 3F5 flanking region.

[0487] In one embodiment, the molecular scaffold may comprise at least one L2 loop motif region and at least one 3F2 flanking region.

[0488] In one embodiment, the molecular scaffold may comprise at least one L1 loop motif region and at least one 3F3 flanking region.

[0489] In one embodiment, the molecular scaffold may comprise at least one L5 loop motif region and at least one 3F4 flanking region.

[0490] In one embodiment, the molecular scaffold may comprise at least one L loop motif region and at least one 3F1 flanking region.

[0491] In one embodiment, the molecular scaffold may comprise at least one L2 loop motif region and at least one 3F1 flanking region.

[0492] In one embodiment, the molecular scaffold may comprise at least one 5′ flanking region, fragment or variant thereof, and at least one 3′ flanking region, fragment or variant thereof, as described in Tables 5 and 7. As a non-limiting example, the flanking regions may be 5F1 and 3F1, 5F1 and 3F2, 5F1 and 3F3, 5F1 and 3F4, 5F1 and 3F5, 5F1 and 3F6, 5F1 and 3F7, 5F2 and 3F1, 5F2 and 3F2, 5F2 and 3F3, 5F2 and 3F4, 5F2 and 3F5, 5F2 and 3F6, 5F2 and 3F7, 5F3 and 3F1, 5F3 and 3F2, 5F3 and 3F3, 5F3 and 3F4, 5F3 and 3F5, 5F3 and 3F6, 5F3 and 3F7, 5F4 and 3F1, 5F4 and 3F2, 5F4 and 3F3, 5F4 and 3F4, 5F4 and 3F5, 5F4 and 3F6, 5F4 and 3F7, 5F5 and 3F1, 5F5 and 3F2, 5F5 and 3F3, 5F5 and 3F4, 5F5 and 3F5, 5F5 and 3F6, 5F5 and 3F7, 5F6 and 3F1, 5F6 and 3F2, 5F6 and 3F3, 5F6 and 3F4, 5F6 and 3F5, 5F6 and 3F6, 5F6 and 3F7, 5F7 and 3F1, 5F7 and 3F2, 5F7 and 3F3, 5F7 and 3F4, 5F7 and 3F5, 5F7 and 3F6, 5F7 and 3F7, 5F8 and 3F1, 5F8 and 3F2, 5F8 and 3F3, 5F8 and 3F4, 5F8 and 3F5, 5F8 and 3F6, and 5F8 and 3F7, 5F9 and 3F1, 5F9 and 3F2, 5F9 and 3F3, 5F9 and 3F4, 5F9 and 3F5, 5F9 and 3F6, and 5F9 and 3F7

[0493] In one embodiment, the molecular scaffold may comprise at least one 5F2 5′ flanking region and at least one 3F2 3′ flanking region.

[0494] In one embodiment, the molecular scaffold may comprise at least one 5F1 5′ flanking region and at least one 3F1 3′ flanking region.

[0495] In one embodiment, the molecular scaffold may comprise at least one 5F7 5′ flanking region and at least one 3F5 3′ flanking region.

[0496] In one embodiment, the molecular scaffold may comprise at least one 5F3 5′ flanking region and at least one 3F1 3′ flanking region.

[0497] In one embodiment, the molecular scaffold may comprise at least one 5F4 5′ flanking region and at least one 3F4 3′ flanking region.

[0498] In one embodiment, the molecular scaffold may comprise at least one 5F5 5′ flanking region and at least one 3F4 3′ flanking region.

[0499] In one embodiment, the molecular scaffold may comprise at least one 5F6 5′ flanking region and at least one 3F1 3′ flanking region.

[0500] In one embodiment, the molecular scaffold may comprise at least one 5F2 5′ flanking region and at least one 3F3 3′ flanking region.

[0501] In one embodiment, the molecular scaffold may comprise at least one 5F3 5′ flanking region and at least one 3F4 3′ flanking region.

[0502] In one embodiment, the molecular scaffold may comprise at least one 5F1 5′ flanking region and at least one 3F2 3′ flanking region.

[0503] In one embodiment, the molecular scaffold may comprise at least one 5′ flanking region, fragment or variant thereof, at least one loop motif region, fragment or variant thereof, and at least one 3′ flanking region as described in Tables 5-7. As a non-limiting example, the flanking and loop motif regions may be 5F1, L1 and 3F1; 5F1, L1 and 3F2; 5F1, L1 and 3F3; 5F1, L1 and 3F4; 5F1, L1 and 3F5; 5F1, L1 and 3F6; 5F1, L1 and 3F7; 5F2, L1 and 3F1; 5F2, L1 and 3F2; 5F2, L1 and 3F3; 5F2, L1 and 3F4; 5F2, L1 and 3F5; 5F2, L1 and 3F6; 5F2, L1 and 3F7; 5F3, L1 and 3F1; 5F3, L1 and 3F2; 5F3, L1 and 3F3; 5F3, L1 and 3F4; 5F3, L1 and 3F5; 5F3, L1 and 3F6; 5F3, L1 and 3F7; 5F4, L1 and 3F1; 5F4, L1 and 3F2; 5F4, L1 and 3F3; 5F4, L1 and 3F4; F4, L1 and 3F5; 5F4, L1 and 3F6; 5F4, L1 and 3F7; 5F5, L1 and 3F1; 5F5, L1 and 3F2; 5F5, L1 and 3F3; 5F5, L1 and 3F4; 5F5, L1 and 3F5; 5F5, L1 and 3F6; 5F5, L1 and 3F7; 5F6, L1 and 3F1; 5F6, L1 and 3F2; 5F6, L1 and 3F3; 5F6, L1 and 3F4; 5F6, L1 and 3F5; 5F6, L1 and 3F6; 5F6, L1 and 3F7; 5F7, L1 and 3F1, 5F7, L1 and 3F2; 5F7, L1 and 3F3; 5F7, L1 and 3F4; 5F7, L1 and 3F5; 5F7, L1 and 3F6; 5F7, L1 and 3F7; 5F8, L1 and 3F1; 5F8, L1 and 3F2; 5F8, L1 and 3F3; 5F8, L1 and 3F4; 5F8, L1 and 3F5; 5F8, L1 and 3F6; 5F8, L1 and 3F7; 5F9, L1 and 3F1; 5F9, L1 and 3F2; 5F9, L1 and 3F3; 5F9, L1 and 3F4; 5F9, L1 and 3F5; 5F9, L1 and 3F6; 5F9, L1 and 3F7; 5F1, L2 and 3F1; 5F1, L2 and 3F2; 5F1, L2 and 3F3; 5F1, L2 and 3F4; 5F1, L2 and 3F5; 5F1, L2 and 3F6; 5F1, L2 and 3F7; 5F2, L2 and 3F1; 5F2, L2 and 3F2; 5F2, L2 and 3F3; 5F2, L2 and 3F4; 5F2, L2 and 3F5; 5F2, L2 and 3F6; 5F2, L2 and 3F7; 5F3, L2 and 3F1; 5F3, L2 and 3F2; 5F3, L2 and 3F3; 5F3, L2 and 3F4; 5F3, L2 and 3F5; 5F3, L2 and 3F6, 5F3, L2 and 3F7; 5F4, L2 and 3F1; 5F4, L2 and 3F2; 5F4, L2 and 3F3; 5F4, L2 and 3F4; 5F4, L2 and 3F5; 5F4, L2 and 3F6; 5F4, L2 and 3F7; 5F5, L2 and 3F1; 5F5, L2 and 3F2; 5F5, L2 and 3F3; 5F5, L2 and 3F4; 5F5, L2 and 3F5; 5F5, L2 and 3F6; 5F5, L2 and 3F7; 5F6, L2 and 3F1; 5F6, L2 and 3F2; 5F6, L2 and 3F3; 5F6, L2 and 3F4; 5F6, L2 and 3F5; 5F6, L2 and 3F6; 5F6, L2 and 3F7; 5F7, L2 and 3F1; 5F7, L2 and 3F2; 5F7, L2 and 3F3; 5F7, L2 and 3F4; 5F7, L2 and 3F5; 5F7, L2 and 3F6; 5F7, L2 and 3F7; 5F8, L2 and 3F1; 5F8, L2 and 3F2; 5F8, L2 and 3F3; 5F8, L2 and 3F4; 5F8, L2 and 3F5; 5F8, L2 and 3F6; 5F8, L2 and 3F7; 5F9, L2 and 3F1; 5F9, L2 and 3F2; 5F9, L2 and 3F3; 5F9, L2 and 3F4; 5F9, L2 and 3F5; 5F9, L2 and 3F6; F9, L2 and 3F7; 5F1, L3 and 3F1; 5F1, L3 and 3F2; 5F1, L3 and 3F3; 5F1, L3 and 3F4; 5F1, L3 and 3F5; 5F1, L3 and 3F6; 5F1, L3 and 3F7; 5F2, L3 and 3F1; 5F2, L3 and 3F2; 5F2, L3 and 3F3; 5F2, L3 and 3F4; 5F2, L3 and 3F5; 5F2, L3 and 3F6; 5F2, L3 and 3F7; 5F3, L3 and 3F1; 5F3, L3 and 3F2; 5F3, L3 and 3F3; 5F3, L3 and 3F4; 5F3, L3 and 3F5; 5F3, L3 and 3F6; 5F3, L3 and 3F7; 5F4, L3 and 3F1; 5F4, L3 and 3F2; 5F4, L3 and 3F3; 5F4, L3 and 3F4; 5F4, L3 and 3F5; 5F4, L3 and 3F6; 5F4, L3 and 3F7; 5F5, L3 and 3F1; 5F5, L3 and 3F2; 5F5, L3 and 3F3; 5F5, L3 and 3F4; 5F5, L3 and 3F5; 5F5, L3 and 3F6; 5F5, L3 and 3F7; 5F6, L3 and 3F1; 5F6, L3 and 3F2; 5F6, L3 and 3F3; 5F6, L3 and 3F4; 5F6, L3 and 3F5; 5F6, L3 and 3F6; 5F6, L3 and 3F7; 5F7, L3 and 3F1; 5F7, L3 and 3F2; 5F7, L3 and 3F3; 5F7, L3 and 3F4; 5F7, L3 and 3F5; 5F7, L3 and 3F6; 5F7, L3 and 3F7; 5F8, L3 and 3F1; 5F8, L3 and 3F2; 5F8, L3 and 3F3; 5F8, L3 and 3F4; 5F8, L3 and 3F5; 5F8, L3 and 3F6; 5F8, L3 and 3F7; 5F9, L3 and 3F1; 5F9, L3 and 3F2; 5F9, L3 and 3F3; 5F9, L3 and 3F4; 5F9, L3 and 3F5; 5F9, L3 and 3F6; 5F9, L3 and 3F7; 5F1, L4 and 3F1; 5F1, L4 and 3F2; 5F1, L4 and 3F3; 5F1, L4 and 3F4; 5F1, L4 and 3F5; 5F1, L4 and 3F6; 5F1, L4 and 3F7, 5F2, L4 and 3F; 5F2, L4 and 3F2; 5F2, L4 and 3F3; 5F2, L4 and 3F4; 5F2, L4 and 3F5; 5F2, L4 and 3F6; 5F2, L4 and 3F7; 5F3, L4 and 3F1; 5F3, L4 and 3F2; 5F3, L4 and 3F3; 5F3, L4 and 3F4; 5F3, L4 and 3F5; 5F3, L4 and 3F6; 5F3, L4 and 3F7; 5F4, L4 and 3F1; 5F4, L4 and 3F2; 5F4, L4 and 3F3; 5F4, L4 and 3F4; 5F4, L4 and 3F5; 5F4, L4 and 3F6; 5F4, L4 and 3F7; 5F5, L4 and 3F; 5F5, L4 and 3F2; 5F5, L4 and 3F3; 5F5, L4 and 3F4; 5F5, L4 and 3F5; 5F5, L4 and 3F6; 5F5, L4 and 3F7; 5F6, L4 and 3F1; 5F6, L4 and 3F2; 5F6, L4 and 3F3; 5F6, L4 and 3F4; 5F6, L4 and 3F5; 5F6, L4 and 3F6; 5F6, L4 and 3F7; 5F7, L4 and 3F1; 5F7, L4 and 3F2; 5F7, L4 and 3F3; 5F7, L4 and 3F4; 5F7, L4 and 3F5; 5F7, L4 and 3F6; 5F7, L4 and 3F7; 5F8, L4 and 3F1; 5F8, L4 and 3F2; 5F8, L4 and 3F3; 5F8, L4 and 3F4; 5F8, L4 and 3F5; 5F8, L4 and 3F6; 5F8, L4 and 3F7; 5F9, L4 and 3F1; 5F9, L4 and 3F2; 5F9, L4 and 3F3; 5F9, L4 and 3F4; 5F9, L4 and 3F5; 5F9, L4 and 3F6; 5F9, L4 and 3F7; 5F1, L5 and 3F1; 5F1, L5 and 3F2; 5F1, L5 and 3F3; 5F1, L5 and 3F4; 5F1, L5 and 3F5; 5F1, L5 and 3F6 S5F1, L5 and 3F7; 5F2, L5 and 3F1; 5F2, L5 and 3F2; 5F2, L5 and 3F3; 5F2, L5 and 3F4; 5F2, L5 and 3F5; 5F2, L5 and 3F6; 5F2, L5 and 3F7; 5F3, L5 and 3F1; 5F3, L5 and 3F2; 5F3, L5 and 3F3; 5F3, L5 and 3F4; 5F3, L5 and 3F5; 5F3, L5 and 3F6; 5F3, L5 and 3F7; 5F4, L5 and 3F1; 5F4, L5 and 3F2; 5F4, L5 and 3F3; 5F4, L5 and 3F4; 5F4, L5 and 3F5; 5F4, L5 and 3F6; 5F4, L5 and 3F7; 5F5, L5 and 3F1; 5F5, L5 and 3F2; 5F5, L5 and 3F3; 5F5, L5 and 3F4; 5F5, L5 and 3F5; 5F5, L5 and 3F6; 5F5, L5 and 3F7; 5F6, L5 and 3F1; 5F6, L5 and 3F2; 5F6, L5 and 3F3; 5F6, L5 and 3F4; 5F6, L5 and 3F5; 5F6, L5 and 3F6; 5F6, L5 and 3F7; 5F7, L5 and 3F1; 5F7, L5 and 3F2; 5F7, L5 and 3F3; 5F7, L5 and 3F4; 5F7, L5 and 3F5; 5F7, L5 and 3F6; 5F7, L5 and 3F7; 5F8, L5 and 3F1; 5F8, L5 and 3F2; 5F8, L5 and 3F3; 5F8, L5 and 3F4; 5F8, L5 and 3F5; 5F8, L5 and 3F6; 5F8, L5 and 3F7; 5F9, L5 and 3F1; 5F9, L5 and 3F2; 5F9, L5 and 3F3; 5F9, L5 and 3F4; 5F9, L5 and 3F5; 5F9, L5 and 3F6; 5F9, L5 and 3F7; 5F1, L6 and 3F1; 5F1, L6 and 3F2 S5F1, L6 and 3F3; 5F1, L6 and 3F4; 5F1, L6 and 3F5; 5F1, L6 and 3F6; 5F1, L6 and 3F7; 5F2, L6 and 3F1; 5F2, L6 and 3F2; 5F2, L6 and 3F3; 5F2, L6 and 3F4; 5F2, L6 and 3F5; 5F2, L6 and 3F6; 5F2, L6 and 3F7; 5F3, L6 and 3F1; 5F3, L6 and 3F2; 5F3, L6 and 3F3; 5F3, L6 and 3F4; 5F3, L6 and 3F5; 5F3, L6 and 3F6; 5F3, L6 and 3F7; 5F4, L6 and 3F1; 5F4, L6 and 3F2; 5F4, L6 and 3F3; 5F4, L6 and 3F4; 5F4, L6 and 3F5; 5F4, L6 and 3F6; 5F4, L6 and 3F7; 5F5, L6 and 3F1; 5F5, L6 and 3F2; 5F5, L6 and 3F3; 5F5, L6 and 3F4; 5F5, L6 and 3F5; 5F5, L6 and 3F6; 5F5, L6 and 3F7; 5F6, L6 and 3F1, 5F6, L6 and 3F2; 5F6, L6 and 3F3; 5F6, L6 and 3F4; 5F6, L6 and 3F5; 5F6, L6 and 3F6; 5F6, L6 and 3F7; 5F7, L6 and 3F1; 5F7, L6 and 3F2; 5F7, L6 and 3F3; 5F7, L6 and 3F4; 5F7, L6 and 3F5; 5F7, L6 and 3F6; 5F7, L6 and 3F7; 5F8, L6 and 3F1; 5F8, L6 and 3F2; 5F8, L6 and 3F3; 5F8, L6 and 3F4; 5F8, L6 and 3F5; 5F8, L6 and 3F6; 5F8, L6 and 3F7; 5F9, L6 and 3F1, 5F9, L6 and 3F2; 5F9, L6 and 3F3; 5F9, L6 and 3F4; 5F9, L6 and 3F5; 5F9, L6 and 3F6; 5F9, L6 and 3F7; 5F1, L7 and 3F1; 5F1, L7 and 3F2; 5F1, L7 and 3F3; 5F1, L7 and 3F4; 5F1, L7 and 3F5; 5F1, L7 and 3F6; 5F1, L7 and 3F7; 5F2, L7 and 3F1; 5F2, L7 and 3F2; 5F2, L7 and 3F3; 5F2, L7 and 3F4; 5F2, L7 and 3F5; 5F2, L7 and 3F6; 5F2, L7 and 3F7; 5F3, L7 and 3F1; 5F3, L7 and 3F2; 5F3, L7 and 3F3; 5F3, L7 and 3F4; 5F3, L7 and 3F5; 5F3, L7 and 3F6; 5F3, L7 and 3F7; 5F4, L7 and 3F1; 5F4, L7 and 3F2; 5F4, L7 and 3F3; 5F4, L7 and 3F4; 5F4, L7 and 3F5; 5F4, L7 and 3F6; 5F4, L7 and 3F7; 5F5, L7 and 3F1; 5F5, L7 and 3F2; 5F5, L7 and 3F3; 5F5, L7 and 3F4; 5F5, L7 and 3F5; 5F5, L7 and 3F6; 5F5, L7 and 3F7; 5F6, L7 and 3F1; 5F6, L7 and 3F2; 5F6, L7 and 3F3; 5F6, L7 and 3F4; 5F6, L7 and 3F5; 5F6, L7 and 3F6; 5F6, L7 and 3F7; 5F7, L7 and 3F1; 5F7, L7 and 3F2; 5F7, L7 and 3F3; 5F7, L7 and 3F4; 5F7, L7 and 3F5; 5F7, L7 and 3F6; 5F7, L7 and 3F7; 5F8, L7 and 3F1; 5F8, L7 and 3F2; 5F8, L7 and 3F3; 5F8, L7 and 3F4; 5F8, L7 and 3F5; 5F8, L7 and 3F6; 5F8, L7 and 3F7; 5F9, L7 and 3F1; 5F9, L7 and 3F2; 5F9, L7 and 3F3; 5F9, L7 and 3F4; 5F9, L7 and 3F5; 5F9, L7 and 3F6; 5F9, L7 and 3F7; 5F1, L8 and 3F1; 5F1, L8 and 3F2; 5F1, L8 and 3F3; 5F1, L8 and 3F4; 5F1, L8 and 3F5; 5F1, L8 and 3F6; 5F1, L8 and 3F7; 5F2, L8 and 3F1; 5F2, L8 and 3F2; 5F2, L8 and 3F3; 5F2, L8 and 3F4; 5F2, L8 and 3F5; 5F2, L8 and 3F6; 5F2, L8 and 3F7; 5F3, L8 and 3F1; 5F3, L8 and 3F2; 5F3, L8 and 3F3; 5F3, L8 and 3F4; 5F3, L8 and 3F5; 5F3, L8 and 3F6; 5F3, L8 and 3F7; 5F4, L8 and 3F1; 5F4, L8 and 3F2; 5F4, L8 and 3F3; 5F4, L8 and 3F4; 5F4, L8 and 3F5; 5F4, L8 and 3F6; 5F4, L8 and 3F7; 5F5, L8 and 3F1; 5F5, L8 and 3F2; 5F5, L8 and 3F3; 5F5, L8 and 3F4; 5F5, L8 and 3F5; 5F5, L8 and 3F6; 5F5, L8 and 3F7; 5F6, L8 and 3F1; 5F6, L8 and 3F2; 5F6, L8 and 3F3; 5F6, L8 and 3F4; 5F6, L8 and 3F5; 5F6, L8 and 3F6; 5F6, L8 and 3F7; 5F7, L8 and 3F1; 5F7, L8 and 3F2; 5F7, L8 and 3F3; 5F7, L8 and 3F4; 5F7, L8 and 3F5; 5F7, L8 and 3F6; 5F7, L8 and 3F7; 5F8, L8 and 3F1; 5F8, L8 and 3F2; 5F8, L8 and 3F3; 5F8, L8 and 3F4; 5F8, L8 and 3F5; 5F8, L8 and 3F6; 5F8, L8 and 3F7; 5F9, L8 and 3F1; 5F9, L8 and 3F2; 5F9, L8 and 3F3; 5F9, L8 and 3F4; 5F9, L8 and 3F5; 5F9, L8 and 3F6; 5F9, L8 and 3F7; 5F1, L9 and 3F; S5F1, L9 and 3F2; 5F1, L9 and 3F3; 5F1, L9 and 3F4; 5F1, L9 and 3F5; 5F1, L9 and 3F6; F1, L9 and 3F7; 5F2, L9 and 3F1; 5F2, L9 and 3F2; 5F2, L9 and 3F3; 5F2, L9 and 3F4; 5F2, L9 and 3F5; 5F2, L9 and 3F6; 5F2, L9 and 3F7; 5F3, L9 and 3F1; 5F3, L9 and 3F2; 5F3, L9 and 3F3; 5F3, L9 and 3F4; 5F3, L9 and 3F5; 5F3, L9 and 3F6; 5F3, L9 and 3F7; 5F4, L9 and 3F1; 5F4, L9 and 3F2; 5F4, L9 and 3F3; 5F4, L9 and 3F4; 5F4, L9 and 3F5; 5F4, L9 and 3F6; 5F4, L9 and 3F7; 5F5, L9 and 3F1; 5F5, L9 and 3F2; 5F5, L9 and 3F3; 5F5, L9 and 3F4; 5F5, L9 and 3F5; 5F5, L9 and 3F6; 5F5, L9 and 3F7; 5F6, L9 and 3F1; 5F6, L9 and 3F2; 5F6, L9 and 3F3; 5F6, L9 and 3F4; 5F6, L9 and 3F5; 5F6, L9 and 3F6; 5F6, L9 and 3F7; 5F7, L9 and 3F1; 5F7, L9 and 3F2; 5F7, L9 and 3F3; 5F7, L9 and 3F4; 5F7, L9 and 3F5; 5F7, L9 and 3F6; 5F7, L9 and 3F7; 5F8, L9 and 3F1; 5F8, L9 and 3F2; 5F8, L9 and 3F3; 5F8, L9 and 3F4; 5F8, L9 and 3F5; 5F8, L9 and 3F6; 5F8, L9 and 3F7; 5F9, L9 and 3F1; 5F9, L9 and 3F2; 5F9, L9 and 3F3; 5F9, L9 and 3F4; 5F9, L9 and 3F5; 5F9, L9 and 3F6; 5F9, L9 and 3F7; 5F1, L10 and 3F1; 5F1, L10 and 3F2; 5F1, L10 and 3F3; 5F1, L10 and 3F4; 5F1, L10 and 3F5; 5F1, L10 and 3F6; 5F1, L10 and 3F7; 5F2, L10 and 3F1; 5F2, L10 and 3F2; 5F2, L10 and 3F3; 5F2, L10 and 3F4; 5F2, L10 and 3F5; 5F2, L10 and 3F6; 5F2, L10 and 3F7; 5F3, L10 and 3F1; 5F3, L10 and 3F2; 5F3, L10 and 3F3; 5F3, L0 and 3F4; 5F3, L0 and 3F5; 5F3, L0 and 3F6; 5F3, L0 and 3F7; 5F4, L10 and 3F1; 5F4, L10 and 3F2; 5F4, L10 and 3F3; 5F4, L10 and 3F4; 5F4, L10 and 3F5; 5F4, L10 and 3F6; 5F4, L10 and 3F7; 5F5, L10 and 3F1; 5F5, L10 and 3F2; 5F5, L10 and 3F3; 5F5, L10 and 3F4; 5F5, L10 and 3F5; 5F5, L10 and 3F6; 5F5, L10 and 3F7; 5F6, L10 and 3F1; 5F6, L10 and 3F2; 5F6, L10 and 3F3; 5F6, L10 and 3F4; 5F6, L10 and 3F5; 5F6, L10 and 3F6; 5F6, L10 and 3F7; 5F7, L10 and 3F1; 5F7, L10 and 3F2; 5F7, L10 and 3F3; 5F7, L10 and 3F4; 5F7, L10 and 3F5; 5F7, L0 and 3F6; 5F7, L0 and 3F7; 5F8, L0 and 3F1; 5F8, L0 and 3F2; 5F8, L10 and 3F3; 5F8, L10 and 3F4; 5F8, L10 and 3F5; 5F8, L10 and 3F6; 5F8, L10 and 3F7; 5F9, L10 and 3F1; 5F9, L10 and 3F2; 5F9, L10 and 3F3; 5F9, L10 and 3F4; 5F9, L10 and 3F5; 5F9, L10 and 3F6; and 5F9, L10 and 3F7.

[0504] In one embodiment, the molecular scaffold may comprise at least one 5F2 5′ flanking region, at least one L1 loop motif region, and at least one 3F2 3′ flanking region.

[0505] In one embodiment, the molecular scaffold may comprise at least one 5F1 5′ flanking region, at least one L4 loop motif region, and at least one 3F1 3′ flanking region.

[0506] In one embodiment, the molecular scaffold may comprise at least one 5F7 5′ flanking region, at least one L8 loop motif region, and at least one 3F5 3′ flanking region.

[0507] In one embodiment, the molecular scaffold may comprise at least one 5F3 5′ flanking region, at least one L4 loop motif region, and at least one 3F1 3′ flanking region.

[0508] In one embodiment, the molecular scaffold may comprise at least one 5F3 5′ flanking region, at least one L5 loop motif region, and at least one 3F1 3′ flanking region.

[0509] In one embodiment, the molecular scaffold may comprise at least one 5F4 5′ flanking region, at least one L4 loop motif region, and at least one 3F4 3′ flanking region.

[0510] In one embodiment, the molecular scaffold may comprise at least one 5F3 5′ flanking region, at least one L7 loop motifregion, and at least one 3F1 3′ flanking region.

[0511] In one embodiment, the molecular scaffold may comprise at least one 5F5 5′ flanking region, at least one L4 loop motif region, and at least one 3F4 3′ flanking region.

[0512] In one embodiment, the molecular scaffold may comprise at least one 5F6 5′ flanking region, at least one L4 loop motif region, and at least one 3F1 3′ flanking region.

[0513] In one embodiment, the molecular scaffold may comprise at least one 5F3 5′ flanking region, at least one L6 loop motif region, and at least one 3F1 3′ flanking region.

[0514] In one embodiment, the molecular scaffold may comprise at least one 5F7 5′ flanking region, at least one L4 loop motif region, and at least one 3F5 3′ flanking region.

[0515] In one embodiment, the molecular scaffold may comprise at least one 5F2 5′ flanking region, at least one L2 loop motif region, and at least one 3F2 3′ flanking region.

[0516] In one embodiment, the molecular scaffold may comprise at least one 5F2 5′ flanking region, at least one L1 loop motif region, and at least one 3F3 3′ flanking region.

[0517] In one embodiment, the molecular scaffold may comprise at least one 5F3 5′ flanking region, at least one L5 loop motif region, and at least one 3F4 3′ flanking region.

[0518] In one embodiment, the molecular scaffold may comprise at least one 5F1 5′ flanking region, at least one L1 loop motif region, and at least one 3F1 3′ flanking region.

[0519] In one embodiment, the molecular scaffold may comprise at least one 5F1 5′ flanking region, at least one L2 loop motifregion, and at least one 3F1 3′ flanking region.

[0520] In one embodiment, the molecular scaffold may comprise at least one 5F1 5′ flanking region, at least one L1 loop motifregion, and at least one 3F2 3′ flanking region.

[0521] In one embodiment, the molecular scaffold may comprise at least one 5F2 5′ flanking region, at least one L3 loop motif region, and at least one 3F3 3′ flanking region.

[0522] In one embodiment, the molecular scaffold may be a natural pri-miRNA scaffold. As a non-limiting example, the molecular scaffold may be a scaffold derived from the human miR155 scaffold.

[0523] In one embodiment, the molecular scaffold may comprise one or more linkers known in the art. The linkers may separate regions or one molecular scaffold from another. As a non-limiting example, the molecular scaffold may be polycistronic.

Modulatory Polynucleotide Comprising Molecular Scaffold and siRNA Molecules Targeting SOD1

[0524] In one embodiment, the modulatory polynucleotide may comprise 5′ and 3′ flanking regions, loop motif region, and nucleic acid sequences encoding sense sequence and antisense sequence as described in Tables 8 and 9. In Tables 8 and 9, the DNA sequence identifier for the passenger and guide strands are described as well as the 5′ and 3′ Flanking Regions and the Loop region (also referred to as the linker region). In Tables 8 and 9, the “miR” component of the name of the sequence does not necessarily correspond to the sequence numbering of miRNA genes (e.g., VOYSOD1miR-102 is the name of the sequence and does not necessarily mean that miR-102 is part of the sequence).

TABLE 8
SOD1 Modulatory Polynucleotide Sequence Regions (5′ to 3′)

| Modulatory | 5′ Flanking to | | | | | |
|---|---|---|---|---|---|---|
| Polynucleotide | 3′ Flanking | 5′ Flanking | Passenger | Loop | Guide | 3′ Flanking |
| Construct Name | SEQ ID NO | SEQ ID NO | SEQ ID NO | SEQ ID NO | SEQ ID NO | SEQ ID NO |
| VOYSOD1miR-101 | 1281 | 1262 | 1331 | 1268 | 1332 | 1279 |
| VOYSOD1miR-102 | 1282 | 1257 | 1331 | 1268 | 1332 | 1274 |
| VOYSOD1miR-103 | 1283 | 1257 | 1333 | 1268 | 1332 | 1274 |
| VOYSOD1miR-104 | 1284 | 1257 | 1334 | 1268 | 1332 | 1274 |
| VOYSOD1miR-105 | 1285 | 1257 | 1335 | 1268 | 1332 | 1274 |
| VOYSOD1miR-106 | 1286 | 1257 | 1336 | 1268 | 1332 | 1274 |
| VOYSOD1miR-107 | 1287 | 1257 | 1337 | 1268 | 1332 | 1274 |
| VOYSOD1miR-108 | 1288 | 1257 | 1339 | 1268 | 1332 | 1274 |
| VOYSOD1miR-109 | 1289 | 1257 | 1331 | 1264 | 1332 | 1274 |
| VOYSOD1miR-110 | 1290 | 1257 | 1331 | 1272 | 1332 | 1274 |
| VOYSOD1miR-111 | 1291 | 1257 | 1338 | 1273 | 1332 | 1274 |
| VOYSOD1miR-112 | 1292 | 1257 | 1331 | 1268 | 1332 | 1275 |
| VOYSOD1miR-113 | 1293 | 1257 | 1333 | 1268 | 1332 | 1275 |
| VOYSOD1miR-114 | 1294 | 1257 | 1336 | 1268 | 1332 | 1275 |
| VOYSOD1miR-115 | 1295 | 1257 | 1338 | 1273 | 1332 | 1275 |
| VOYSOD1miR-116 | 1296 | 1257 | 1334 | 1268 | 1332 | 1275 |
| VOYSOD1miR-117 | 1297 | 1257 | 1340 | 1268 | 1341 | 1274 |
| VOYSOD1miR-118 | 1298 | 1257 | 1342 | 1268 | 1343 | 1274 |
| VOYSOD1miR-119 | 1299 | 1257 | 1344 | 1268 | 1345 | 1274 |
| VOYSOD1miR-127 | 1300 | 1255 | 1331 | 1265 | 1332 | 1276 |
| VOYSOD1miR-102.860 | 1301 | 1257 | 1346 | 1268 | 1347 | 1274 |
| VOYSOD1miR-102.861 | 1302 | 1257 | 1348 | 1268 | 1349 | 1274 |
| VOYSOD1miR-102.866 | 1303 | 1257 | 1350 | 1268 | 1345 | 1274 |
| VOYSOD1miR-102.870 | 1304 | 1257 | 1351 | 1268 | 1352 | 1274 |
| VOYSOD1miR-102.823 | 1305 | 1257 | 1353 | 1268 | 1343 | 1274 |
| VOYSOD1miR-104.860 | 1306 | 1257 | 1354 | 1268 | 1347 | 1274 |
| VOYSOD1miR-104.861 | 1307 | 1257 | 1355 | 1268 | 1349 | 1274 |
| VOYSOD1miR-104.866 | 1308 | 1257 | 1356 | 1268 | 1345 | 1274 |
| VOYSOD1miR-104.870 | 1309 | 1257 | 1357 | 1268 | 1352 | 1274 |
| VOYSOD1miR-104.823 | 1310 | 1257 | 1358 | 1268 | 1343 | 1274 |
| VOYSOD1miR-109.860 | 1311 | 1257 | 1346 | 1264 | 1347 | 1274 |
| VOYSOD1miR-109.861 | 1312 | 1257 | 1348 | 1264 | 1349 | 1274 |
| VOYSOD1miR-109.866 | 1313 | 1257 | 1350 | 1264 | 1345 | 1274 |
| VOYSOD1miR-109.870 | 1314 | 1257 | 1351 | 1264 | 1352 | 1274 |
| VOYSOD1miR-109.823 | 1315 | 1257 | 1353 | 1264 | 1343 | 1274 |
| VOYSOD1miR-114.860 | 1316 | 1257 | 1359 | 1268 | 1347 | 1275 |
| VOYSOD1miR-114.861 | 1317 | 1257 | 1360 | 1268 | 1349 | 1275 |
| VOYSOD1miR-114.866 | 1318 | 1257 | 1361 | 1268 | 1345 | 1275 |
| VOYSOD1miR-114.870 | 1319 | 1257 | 1362 | 1268 | 1352 | 1275 |
| VOYSOD1miR-114.823 | 1320 | 1257 | 1363 | 1268 | 1343 | 1275 |
| VOYSOD1miR-116.860 | 1321 | 1257 | 1354 | 1268 | 1347 | 1275 |
| VOYSOD1miR-116.861 | 1322 | 1257 | 1355 | 1268 | 1349 | 1275 |
| VOYSOD1miR-116.866 | 1323 | 1257 | 1364 | 1268 | 1345 | 1275 |
| VOYSOD1miR-116.870 | 1324 | 1257 | 1357 | 1268 | 1352 | 1275 |
| VOYSOD1miR-116.823 | 1325 | 1257 | 1358 | 1268 | 1343 | 1275 |
| VOYSOD1miR-127.860 | 1326 | 1255 | 1365 | 1265 | 1347 | 1276 |
| VOYSOD1miR-127.861 | 1327 | 1255 | 1348 | 1265 | 1349 | 1276 |
| VOYSOD1miR-127.866 | 1328 | 1255 | 1350 | 1265 | 1345 | 1276 |
| VOYSOD1miR-127.870 | 1329 | 1255 | 1351 | 1265 | 1352 | 1276 |
| VOYSOD1miR-127.823 | 1330 | 1255 | 1366 | 1265 | 1343 | 1276 |

TABLE 9
SOD1 Modulatory Polynucleotide Sequence Region (5′ to 3′)

| | 5′ Flanking to | | | | | |
|---|---|---|---|---|---|---|
| | 3′ Flanking | 5′ Flanking | Passenger | Loop | Guide | 3′ Flanking |
| Name | SEQ ID NO | SEQ ID NO | SEQ ID NO | SEQ ID NO | SEQ ID NO | SEQ ID NO |
| VOYSOD1miR-120 | 1367 | 1263 | 1368 | 1264 | 1369 | 1280 |

### AAV Particles Comprising Modulatory Polynucleotides

[0525] In one embodiment, the AAV particle comprises a viral genome with a payload region comprising a modulatory polynucleotide sequences. In such an embodiment, a viral genome encoding more than one polypeptide may be replicated and packaged into a viral particle. A target cell transduced with a viral particle comprising a modulatory polynucleotide may express the encoded sense and/or antisense sequences in a single cell.

[0526] In some embodiments, the AAV particles are useful in the field of medicine for the treatment, prophylaxis, palliation or amelioration of neurological diseases and/or disorders.

[0527] In one embodiment, the AAV particles comprising modulatory polynucleotide sequence which comprises a nucleic acid sequence encoding at least one siRNA molecule may be introduced into mammalian cells.

[0528] Where the AAV particle payload region comprises a modulatory polynucleotide, the modulatory polynucleotide may comprise sense and/or antisense sequences to knock down a target gene. The AAV viral genomes encoding modulatory polynucleotides described herein may be useful in the fields of human disease, viruses, infections veterinary applications and a variety of in vivo and in vitro settings.

[0529] In one embodiment, the AAV particle viral genome may comprise at least one inverted terminal repeat (ITR) region. The ITR region(s) may, independently, have a length such as, but not limited to, 75, 76, 77, 78, 79, 80, 81, 82, 83, 84, 85, 86, 87, 88, 89, 90, 91, 92, 93, 94, 95, 96, 97, 98, 99, 100, 101, 102, 103, 104, 105, 106, 107, 108, 109, 110, 111, 112, 113, 114, 115, 116, 117, 118, 119, 120, 121, 122, 123, 124, 125, 126, 127, 128, 129, 130, 131, 132, 133, 134, 135, 136, 137, 138, 139, 140, 141, 142, 143, 144, 145, 146, 147, 148, 149, 150, 151, 152, 153, 154, 155, 156, 157, 158, 159, 160, 161, 162, 163, 164, 165, 166, 167, 168, 169, 170, 171, 172, 173, 174, and 175 nucleotides. The length of the ITR region for the viral genome may be 75-80, 75-85, 75-100, 80-85, 80-90, 80-105, 85-90, 85-95, 85-110, 90-95, 90-100, 90-115, 95-100, 95-105, 95-120, 100-105, 100-110, 100-125, 105-110, 105-115, 105-130, 110-115, 110-120, 110-135, 115-120, 115-125, 115-140, 120-125, 120-130, 120-145, 125-130, 125-135, 125-150, 130-135, 130-140, 130-155, 135-140, 135-145, 135-160, 140-145, 140-150, 140-165, 145-150, 145-155, 145-170, 150-155, 150-160, 150-175, 155-160, 155-165, 160-165, 160-170, 165-170, 165-175, and 170-175 nucleotides. As a non-limiting example, the viral genome comprises an ITR that is about 105 nucleotides in length. As a non-limiting example, the viral genome comprises an ITR that is about 141 nucleotides in length. As a non-limiting example, the viral genome comprises an ITR that is about 130 nucleotides in length.

[0530] In one embodiment, the AAV particle viral genome may comprises two inverted terminal repeat (ITR) regions. Each of the ITR regions may independently have a length such as, but not limited to, 75, 76, 77, 78, 79, 80, 81, 82, 83, 84, 85, 86, 87, 88, 89, 90, 91, 92, 93, 94, 95, 96, 97, 98, 99, 100, 101, 102, 103, 104, 105, 106, 107, 108, 109, 110, 111, 112, 113, 114, 115, 116, 117, 118, 119, 120, 121, 122, 123, 124, 125, 126, 127, 128, 129, 130, 131, 132, 133, 134, 135, 136, 137, 138, 139, 140, 141, 142, 143, 144, 145, 146, 147, 148, 149, 150, 151, 152, 153, 154, 155, 156, 157, 158, 159, 160, 161, 162, 163, 164, 165, 166, 167, 168, 169, 170, 171, 172, 173, 174, and 175 nucleotides. The length of the ITR regions for the viral genome may be 75-80, 75-85, 75-100, 80-85, 80-90, 80-105, 85-90, 85-95, 85-110, 90-95, 90-100, 90-115, 95-100, 95-105, 95-120, 100-105, 100-110, 100-125, 105-110, 105-115, 105-130, 110-115, 110-120, 110-135, 115-120, 115-125, 115-140, 120-125, 120-130, 120-145, 125-130, 125-135, 125-150, 130-135, 130-140, 130-155, 135-140, 135-145, 135-160, 140-145, 140-150, 140-165, 145-150, 145-155, 145-170, 150-155, 150-160, 150-175, 155-160, 155-165, 160-165, 160-170, 165-170, 165-175, and 170-175 nucleotides. As a non-limiting example, the viral genome comprises an ITR that is about 105 nucleotides in length and 141 nucleotides in length. As a non-limiting example, the viral genome comprises an ITR that is about 105 nucleotides in length and 130 nucleotides in length. As a non-limiting example, the viral genome comprises an ITR that is about 130 nucleotides in length and 141 nucleotides in length.

[0531] In one embodiment, the AAV particle viral genome may comprise at least one sequence region as described in Tables 10-17. The regions may be located before or after any of the other sequence regions described herein.

[0532] In one embodiment, the AAV particle viral genome comprises at least one inverted terminal repeat (ITR) sequence region. Non-limiting examples of ITR sequence regions are described in Table 10.

TABLE 10
Inverted Terminal Repeat (ITR) Sequence Regions

| Sequence Region Name | SEQ ID NO |
|---|---|
| ITR1 | 1370 |
| ITR2 | 1371 |
| ITR3 | 1372 |
| ITR4 | 1373 |

[0533] In one embodiment, the AAV particle viral genome comprises two ITR sequence regions. In one embodiment, the ITR sequence regions are the ITR1 sequence region and the ITR3 sequence region. In one embodiment, the ITR sequence regions are the ITR1 sequence region and the ITR4 sequence region. In one embodiment, the ITR sequence regions are the ITR2 sequence region and the ITR3 sequence region. In one embodiment, the ITR sequence regions are the ITR2 sequence region and the ITR4 sequence region.

[0534] In one embodiment, the AAV particle viral genome may comprise at least one multiple cloning site (MCS) sequence region. The MCS region(s) may, independently, have a length such as, but not limited to, 2, 3, 4, 5, 6, 7, 8, 9, 10, 11, 12, 13, 14, 15, 16, 17, 18, 19, 20, 21, 22, 23, 24, 25, 26, 27, 28, 29, 30, 31, 32, 33, 34, 35, 36, 37, 38, 39, 40, 41, 42, 43, 44, 45, 46, 47, 48, 49, 50, 51, 52, 53, 54, 55, 56, 57, 58, 59, 60, 61, 62, 63, 64, 65, 66, 67, 68, 69, 70, 71, 72, 73, 74, 75, 76, 77, 78, 79, 80, 81, 82, 83, 84, 85, 86, 87, 88, 89, 90, 91, 92, 93, 94, 95, 96, 97, 98, 99, 100, 101, 102, 103, 104, 105, 106, 107, 108, 109, 110, 111, 112, 113, 114, 115, 116, 117, 118, 119, 120, 121, 122, 123, 124, 125, 126, 127, 128, 129, 130, 131, 132, 133, 134, 135, 136, 137, 138, 139, 140, 141, 142, 143, 144, 145, 146, 147, 148, 149, and 150 nucleotides. The length of the MCS region for the viral genome may be 2-10, 5-10, 5-15, 10-20, 10-30, 10-40, 15-20, 15-25, 20-30, 20-40, 20-50, 25-30, 25-35, 30-40, 30-50, 30-60, 35-40, 35-45, 40-50, 40-60, 40-70, 45-50, 45-55, 50-60, 50-70, 50-80, 55-60, 55-65, 60-70, 60-80, 60-90, 65-70, 65-75, 70-80, 70-90, 70-100, 75-80, 75-85, 80-90, 80-100, 80-110, 85-90, 85-95, 90-100, 90-110, 90-120, 95-100, 95-105, 100-110, 100-120, 100-130, 105-110, 105-115, 110-120, 110-130, 110-140, 115-120, 115-125, 120-130, 120-140, 120-150, 125-130, 125-135, 130-140, 130-150, 135-140, 135-145, 140-150, and 145-150 nucleotides. As a non-limiting example, the viral genome comprises a MCS region that is about 5 nucleotides in length. As a non-limiting example, the viral genome comprises a MCS region that is about 10 nucleotides in length. As a non-limiting example, the viral genome comprises a MCS region that is about 14 nucleotides in length. As a non-limiting example, the viral genome comprises a MCS region that is about 18 nucleotides in length. As a non-limiting example, the viral genome comprises a MCS region that is about 73 nucleotides in length. As a non-limiting example, the viral genome comprises a MCS region that is about 121 nucleotides in length.

[0535] In one embodiment, the AAV particle viral genome comprises at least one multiple cloning site (MCS) sequence regions. Non-limiting examples of MCS sequence regions are described in Table 11.

TABLE 11
Multiple Cloning Site (MCS) Sequence Regions

| | SEQ ID NO or |
|---|---|
| Sequence Region Name | Sequence |
| MCS1 | 1374 |
| MCS2 | 1375 |
| MCS3 | 1376 |
| MCS4 | 1377 |
| MCS5 | TCGAG |
| MCS6 | 1378 |

[0536] In one embodiment, the AAV particle viral genome comprises one MCS sequence region. In one embodiment, the MCS sequence region is the MCS1 sequence region. In one embodiment, the MCS sequence region is the MCS2 sequence region. In one embodiment, the MCS sequence region is the MCS3 sequence region. In one embodiment, the MCS sequence region is the MCS4 sequence region. In one embodiment, the MCS sequence region is the MCS5 sequence region. In one embodiment, the MCS sequence region is the MCS6 sequence region.

[0537] In one embodiment, the AAV particle viral genome comprises two MCS sequence regions. In one embodiment, the two MCS sequence regions are the MCS1 sequence region and the MCS2 sequence region. In one embodiment, the two MCS sequence regions are the MCS1 sequence region and the MCS3 sequence region. In one embodiment, the two MCS sequence regions are the MCS1 sequence region and the MCS4 sequence region. In one embodiment, the two MCS sequence regions are the MCS1 sequence region and the MCS5 sequence region. In one embodiment, the two MCS sequence regions are the MCS1 sequence region and the MCS6 sequence region. In one embodiment, the two MCS sequence regions are the MCS2 sequence region and the MCS3 sequence region. In one embodiment, the two MCS sequence regions are the MCS2 sequence region and the MCS4 sequence region. In one embodiment, the two MCS sequence regions are the MCS2 sequence region and the MCS5 sequence region. In one embodiment, the two MCS sequence regions are the MCS2 sequence region and the MCS6 sequence region. In one embodiment, the two MCS sequence regions are the MCS3 sequence region and the MCS4 sequence region. In one embodiment, the two MCS sequence regions are the MCS3 sequence region and the MCS5 sequence region. In one embodiment, the two MCS sequence regions are the MCS3 sequence region and the MCS6 sequence region. In one embodiment, the two MCS sequence regions are the MCS4 sequence region and the MCS5 sequence region. In one embodiment, the two MCS sequence regions are the MCS4 sequence region and the MCS6 sequence region. In one embodiment, the two MCS sequence regions are the MCS5 sequence region and the MCS6 sequence region.

[0538] In one embodiment, the AAV particle viral genome comprises two or more MCS sequence regions.

[0539] In one embodiment, the AAV particle viral genome comprises three MCS sequence regions. In one embodiment, the three MCS sequence regions are the MCS1 sequence region, the MCS2 sequence region, and the MCS3 sequence region. In one embodiment, the three MCS sequence regions are the MCS1 sequence region, the MCS2 sequence region, and the MCS4 sequence region. In one embodiment, the three MCS sequence regions are the MCS1 sequence region, the MCS2 sequence region, and the MCS5 sequence region. In one embodiment, the three MCS sequence regions are the MCS1 sequence region, the MCS2 sequence region, and the MCS6 sequence region. In one embodiment, the three MCS sequence regions are the MCS1 sequence region, the MCS3 sequence region, and the MCS4 sequence region. In one embodiment, the three MCS sequence regions are the MCS1 sequence region, the MCS3 sequence region, and the MCS5 sequence region. In one embodiment, the three MCS sequence regions are the MCS1 sequence region, the MCS3 sequence region, and the MCS6 sequence region. In one embodiment, the three MCS sequence regions are the MCS1 sequence region, the MCS4 sequence region, and the MCS5 sequence region. In one embodiment, the three MCS sequence regions are the MCS1 sequence region, the MCS4 sequence region, and the MCS6 sequence region. In one embodiment, the three MCS sequence regions are the MCS1 sequence region, the MCS5 sequence region, and the MCS6 sequence region. In one embodiment, the three MCS sequence regions are the MCS2 sequence region, the MCS3 sequence region, and the MCS4 sequence region. In one embodiment, the three MCS sequence regions are the MCS2 sequence region, the MCS3 sequence region, and the MCS5 sequence region. In one embodiment, the three MCS sequence regions are the MCS2 sequence region, the MCS3 sequence region, and the MCS6 sequence region. In one embodiment, the three MCS sequence regions are the MCS2 sequence region, the MCS4 sequence region, and the MCS5 sequence region. In one embodiment, the three MCS sequence regions are the MCS2 sequence region, the MCS4 sequence region, and the MCS6 sequence region. In one embodiment, the three MCS sequence regions are the MCS2 sequence region, the MCS5 sequence region, and the MCS6 sequence region. In one embodiment, the three MCS sequence regions are the MCS3 sequence region, the MCS4 sequence region, and the MCS5 sequence region. In one embodiment, the three MCS sequence regions are the MCS3 sequence region, the MCS4 sequence region, and the MCS6 sequence region. In one embodiment, the three MCS sequence regions are the MCS3 sequence region, the MCS5 sequence region, and the MCS6 sequence region. In one embodiment, the three MCS sequence regions are the MCS4 sequence region, the MCS5 sequence region, and the MCS6 sequence region.

[0540] In one embodiment, the AAV particle viral genome may comprise at least one multiple filler sequence region. The filler region(s) may, independently, have a length such as, but not limited to, 50, 51, 52, 53, 54, 55, 56, 57, 58, 59, 60, 61, 62, 63, 64, 65, 66, 67, 68, 69, 70, 71, 72, 73, 74, 75, 76, 77, 78, 79, 80, 81, 82, 83, 84, 85, 86, 87, 88, 89, 90, 91, 92, 93, 94, 95, 96, 97, 98, 99, 100, 101, 102, 103, 104, 105, 106, 107, 108, 109, 110, 111, 112, 113, 114, 115, 116, 117, 118, 119, 120, 121, 122, 123, 124, 125, 126, 127, 128, 129, 130, 131, 132, 133, 134, 135, 136, 137, 138, 139, 140, 141, 142, 143, 144, 145, 146, 147, 148, 149, 150, 151, 152, 153, 154, 155, 156, 157, 158, 159, 160, 161, 162, 163, 164, 165, 166, 167, 168, 169, 170, 171, 172, 173, 174, 175, 176, 177, 178, 179, 180, 181, 182, 183, 184, 185, 186, 187, 188, 189, 190, 191, 192, 193, 194, 195, 196, 197, 198, 199, 200, 201, 202, 203, 204, 205, 206, 207, 208, 209, 210, 211, 212, 213, 214, 215, 216, 217, 218, 219, 220, 221, 222, 223, 224, 225, 226, 227, 228, 229, 230, 231, 232, 233, 234, 235, 236, 237, 238, 239, 240, 241, 242, 243, 244, 245, 246, 247, 248, 249, 250, 251, 252, 253, 254, 255, 256, 257, 258, 259, 260, 261, 262, 263, 264, 265, 266, 267, 268, 269, 270, 271, 272, 273, 274, 275, 276, 277, 278, 279, 280, 281, 282, 283, 284, 285, 286, 287, 288, 289, 290, 291, 292, 293, 294, 295, 296, 297, 298, 299, 300, 301, 302, 303, 304, 305, 306, 307, 308, 309, 310, 311, 312, 313, 314, 315, 316, 317, 318, 319, 320, 321, 322, 323, 324, 325, 326, 327, 328, 329, 330, 331, 332, 333, 334, 335, 336, 337, 338, 339, 340, 341, 342, 343, 344, 345, 346, 347, 348, 349, 350, 351, 352, 353, 354, 355, 356, 357, 358, 359, 360, 361, 362, 363, 364, 365, 366, 367, 368, 369, 370, 371, 372, 373, 374, 375, 376, 377, 378, 379, 380, 381, 382, 383, 384, 385, 386, 387, 388, 389, 390, 391, 392, 393, 394, 395, 396, 397, 398, 399, 400, 401, 402, 403, 404, 405, 406, 407, 408, 409, 410, 411, 412, 413, 414, 415, 416, 417, 418, 419, 420, 421, 422, 423, 424, 425, 426, 427, 428, 429, 430, 431, 432, 433, 434, 435, 436, 437, 438, 439, 440, 441, 442, 443, 444, 445, 446, 447, 448, 449, 450, 451, 452, 453, 454, 455, 456, 457, 458, 459, 460, 461, 462, 463, 464, 465, 466, 467, 468, 469, 470, 471, 472, 473, 474, 475, 476, 477, 478, 479, 480, 481, 482, 483, 484, 485, 486, 487, 488, 489, 490, 491, 492, 493, 494, 495, 496, 497, 498, 499, 500, 501, 502, 503, 504, 505, 506, 507, 508, 509, 510, 511, 512, 513, 514, 515, 516, 517, 518, 519, 520, 521, 522, 523, 524, 525, 526, 527, 528, 529, 530, 531, 532, 533, 534, 535, 536, 537, 538, 539, 540, 541, 542, 543, 544, 545, 546, 547, 548, 549, 550, 551, 552, 553, 554, 555, 556, 557, 558, 559, 560, 561, 562, 563, 564, 565, 566, 567, 568, 569, 570, 571, 572, 573, 574, 575, 576, 577, 578, 579, 580, 581, 582, 583, 584, 585, 586, 587, 588, 589, 590, 591, 592, 593, 594, 595, 596, 597, 598, 599, 600, 601, 602, 603, 604, 605, 606, 607, 608, 609, 610, 611, 612, 613, 614, 615, 616, 617, 618, 619, 620, 621, 622, 623, 624, 625, 626, 627, 628, 629, 630, 631, 632, 633, 634, 635, 636, 637, 638, 639, 640, 641, 642, 643, 644, 645, 646, 647, 648, 649, 650, 651, 652, 653, 654, 655, 656, 657, 658, 659, 660, 661, 662, 663, 664, 665, 666, 667, 668, 669, 670, 671, 672, 673, 674, 675, 676, 677, 678, 679, 680, 681, 682, 683, 684, 685, 686, 687, 688, 689, 690, 691, 692, 693, 694, 695, 696, 697, 698, 699, 700, 701, 702, 703, 704, 705, 706, 707, 708, 709, 710, 711, 712, 713, 714, 715, 716, 717, 718, 719, 720, 721, 722, 723, 724, 725, 726, 727, 728, 729, 730, 731, 732, 733, 734, 735, 736, 737, 738, 739, 740, 741, 742, 743, 744, 745, 746, 747, 748, 749, 750, 751, 752, 753, 754, 755, 756, 757, 758, 759, 760, 761, 762, 763, 764, 765, 766, 767, 768, 769, 770, 771, 772, 773, 774, 775, 776, 777, 778, 779, 780, 781, 782, 783, 784, 785, 786, 787, 788, 789, 790, 791, 792, 793, 794, 795, 796, 797, 798, 799, 800, 801, 802, 803, 804, 805, 806, 807, 808, 809, 810, 811, 812, 813, 814, 815, 816, 817, 818, 819, 820, 821, 822, 823, 824, 825, 826, 827, 828, 829, 830, 831, 832, 833, 834, 835, 836, 837, 838, 839, 840, 841, 842, 843, 844, 845, 846, 847, 848, 849, 850, 851, 852, 853, 854, 855, 856, 857, 858, 859, 860, 861, 862, 863, 864, 865, 866, 867, 868, 869, 870, 871, 872, 873, 874, 875, 876, 877, 878, 879, 880, 881, 882, 883, 884, 885, 886, 887, 888, 889, 890, 891, 892, 893, 894, 895, 896, 897, 898, 899, 900, 901, 902, 903, 904, 905, 906, 907, 908, 909, 910, 911, 912, 913, 914, 915, 916, 917, 918, 919, 920, 921, 922, 923, 924, 925, 926, 927, 928, 929, 930, 931, 932, 933, 934, 935, 936, 937, 938, 939, 940, 941, 942, 943, 944, 945, 946, 947, 948, 949, 950, 951, 952, 953, 954, 955, 956, 957, 958, 959, 960, 961, 962, 963, 964, 965, 966, 967, 968, 969, 970, 971, 972, 973, 974, 975, 976, 977, 978, 979, 980, 981, 982, 983, 984, 985, 986, 987, 988, 989, 990, 991, 992, 993, 994, 995, 996, 997, 998, 999, 1000, 1001, 1002, 1003, 1004, 1005, 1006, 1007, 1008, 1009, 1010, 1011, 1012, 1013, 1014, 1015, 1016, 1017, 1018, 1019, 1020, 1021, 1022, 1023, 1024, 1025, 1026, 1027, 1028, 1029, 1030, 1031, 1032, 1033, 1034, 1035, 1036, 1037, 1038, 1039, 1040, 1041, 1042, 1043, 1044, 1045, 1046, 1047, 1048, 1049, 1050, 1051, 1052, 1053, 1054, 1055, 1056, 1057, 1058, 1059, 1060, 1061, 1062, 1063, 1064, 1065, 1066, 1067, 1068, 1069, 1070, 1071, 1072, 1073, 1074, 1075, 1076, 1077, 1078, 1079, 1080, 1081, 1082, 1083, 1084, 1085, 1086, 1087, 1088, 1089, 1090, 1091, 1092, 1093, 1094, 1095, 1096, 1097, 1098, 1099, 1100, 1101, 1102, 1103, 1104, 1105, 1106, 1107, 1108, 1109, 1110, 1111, 1112, 1113, 1114, 1115, 1116, 1117, 1118, 1119, 1120, 1121, 1122, 1123, 1124, 1125, 1126, 1127, 1128, 1129, 1130, 1131, 1132, 1133, 1134, 1135, 1136, 1137, 1138, 1139, 1140, 1141, 1142, 1143, 1144, 1145, 1146, 1147, 1148, 1149, 1150, 1151, 1152, 1153, 1154, 1155, 1156, 1157, 1158, 1159, 1160, 1161, 1162, 1163, 1164, 1165, 1166, 1167, 1168, 1169, 1170, 1171, 1172, 1173, 1174, 1175, 1176, 1177, 1178, 1179, 1180, 1181, 1182, 1183, 1184, 1185, 1186, 1187, 1188, 1189, 1190, 1191, 1192, 1193, 1194, 1195, 1196, 1197, 1198, 1199, 1200, 1201, 1202, 1203, 1204, 1205, 1206, 1207, 1208, 1209, 1210, 1211, 1212, 1213, 1214, 1215, 1216, 1217, 1218, 1219, 1220, 1221, 1222, 1223, 1224, 1225, 1226, 1227, 1228, 1229, 1230, 1231, 1232, 1233, 1234, 1235, 1236, 1237, 1238, 1239, 1240, 1241, 1242, 1243, 1244, 1245, 1246, 1247, 1248, 1249, 1250, 1251, 1252, 1253, 1254, 1255, 1256, 1257, 1258, 1259, 1260, 1261, 1262, 1263, 1264, 1265, 1266, 1267, 1268, 1269, 1270, 1271, 1272, 1273, 1274, 1275, 1276, 1277, 1278, 1279, 1280, 1281, 1282, 1283, 1284, 1285, 1286, 1287, 1288, 1289, 1290, 1291, 1292, 1293, 1294, 1295, 1296, 1297, 1298, 1299, 1300, 1301, 1302, 1303, 1304, 1305, 1306, 1307, 1308, 1309, 1310, 1311, 1312, 1313, 1314, 1315, 1316, 1317, 1318, 1319, 1320, 1321, 1322, 1323, 1324, 1325, 1326, 1327, 1328, 1329, 1330, 1331, 1332, 1333, 1334, 1335, 1336, 1337, 1338, 1339, 1340, 1341, 1342, 1343, 1344, 1345, 1346, 1347, 1348, 1349, 1350, 1351, 1352, 1353, 1354, 1355, 1356, 1357, 1358, 1359, 1360, 1361, 1362, 1363, 1364, 1365, 1366, 1367, 1368, 1369, 1370, 1371, 1372, 1373, 1374, 1375, 1376, 1377, 1378, 1379, 1380, 1381, 1382, 1383, 1384, 1385, 1386, 1387, 1388, 1389, 1390, 1391, 1392, 1393, 1394, 1395, 1396, 1397, 1398, 1399, 1400, 1401, 1402, 1403, 1404, 1405, 1406, 1407, 1408, 1409, 1410, 1411, 1412, 1413, 1414, 1415, 1416, 1417, 1418, 1419, 1420, 1421, 1422, 1423, 1424, 1425, 1426, 1427, 1428, 1429, 1430, 1431, 1432, 1433, 1434, 1435, 1436, 1437, 1438, 1439, 1440, 1441, 1442, 1443, 1444, 1445, 1446, 1447, 1448, 1449, 1450, 1451, 1452, 1453, 1454, 1455, 1456, 1457, 1458, 1459, 1460, 1461, 1462, 1463, 1464, 1465, 1466, 1467, 1468, 1469, 1470, 1471, 1472, 1473, 1474, 1475, 1476, 1477, 1478, 1479, 1480, 1481, 1482, 1483, 1484, 1485, 1486, 1487, 1488, 1489, 1490, 1491, 1492, 1493, 1494, 1495, 1496, 1497, 1498, 1499, 1500, 1501, 1502, 1503, 1504, 1505, 1506, 1507, 1508, 1509, 1510, 1511, 1512, 1513, 1514, 1515, 1516, 1517, 1518, 1519, 1520, 1521, 1522, 1523, 1524, 1525, 1526, 1527, 1528, 1529, 1530, 1531, 1532, 1533, 1534, 1535, 1536, 1537, 1538, 1539, 1540, 1541, 1542, 1543, 1544, 1545, 1546, 1547, 1548, 1549, 1550, 1551, 1552, 1553, 1554, 1555, 1556, 1557, 1558, 1559, 1560, 1561, 1562, 1563, 1564, 1565, 1566, 1567, 1568, 1569, 1570, 1571, 1572, 1573, 1574, 1575, 1576, 1577, 1578, 1579, 1580, 1581, 1582, 1583, 1584, 1585, 1586, 1587, 1588, 1589, 1590, 1591, 1592, 1593, 1594, 1595, 1596, 1597, 1598, 1599, 1600, 1601, 1602, 1603, 1604, 1605, 1606, 1607, 1608, 1609, 1610, 1611, 1612, 1613, 1614, 1615, 1616, 1617, 1618, 1619, 1620, 1621, 1622, 1623, 1624, 1625, 1626, 1627, 1628, 1629, 1630, 1631, 1632, 1633, 1634, 1635, 1636, 1637, 1638, 1639, 1640, 1641, 1642, 1643, 1644, 1645, 1646, 1647, 1648, 1649, 1650, 1651, 1652, 1653, 1654, 1655, 1656, 1657, 1658, 1659, 1660, 1661, 1662, 1663, 1664, 1665, 1666, 1667, 1668, 1669, 1670, 1671, 1672, 1673, 1674, 1675, 1676, 1677, 1678, 1679, 1680, 1681, 1682, 1683, 1684, 1685, 1686, 1687, 1688, 1689, 1690, 1691, 1692, 1693, 1694, 1695, 1696, 1697, 1698, 1699, 1700, 1701, 1702, 1703, 1704, 1705, 1706, 1707, 1708, 1709, 1710, 1711, 1712, 1713, 1714, 1715, 1716, 1717, 1718, 1719, 1720, 1721, 1722, 1723, 1724, 1725, 1726, 1727, 1728, 1729, 1730, 1731, 1732, 1733, 1734, 1735, 1736, 1737, 1738, 1739, 1740, 1741, 1742, 1743, 1744, 1745, 1746, 1747, 1748, 1749, 1750, 1751, 1752, 1753, 1754, 1755, 1756, 1757, 1758, 1759, 1760, 1761, 1762, 1763, 1764, 1765, 1766, 1767, 1768, 1769, 1770, 1771, 1772, 1773, 1774, 1775, 1776, 1777, 1778, 1779, 1780, 1781, 1782, 1783, 1784, 1785, 1786, 1787, 1788, 1789, 1790, 1791, 1792, 1793, 1794, 1795, 1796, 1797, 1798, 1799, 1800, 1801, 1802, 1803, 1804, 1805, 1806, 1807, 1808, 1809, 1810, 1811, 1812, 1813, 1814, 1815, 1816, 1817, 1818, 1819, 1820, 1821, 1822, 1823, 1824, 1825, 1826, 1827, 1828, 1829, 1830, 1831, 1832, 1833, 1834, 1835, 1836, 1837, 1838, 1839, 1840, 1841, 1842, 1843, 1844, 1845, 1846, 1847, 1848, 1849, 1850, 1851, 1852, 1853, 1854, 1855, 1856, 1857, 1858, 1859, 1860, 1861, 1862, 1863, 1864, 1865, 1866, 1867, 1868, 1869, 1870, 1871, 1872, 1873, 1874, 1875, 1876, 1877, 1878, 1879, 1880, 1881, 1882, 1883, 1884, 1885, 1886, 1887, 1888, 1889, 1890, 1891, 1892, 1893, 1894, 1895, 1896, 1897, 1898, 1899, 1900, 1901, 1902, 1903, 1904, 1905, 1906, 1907, 1908, 1909, 1910, 1911, 1912, 1913, 1914, 1915, 1916, 1917, 1918, 1919, 1920, 1921, 1922, 1923, 1924, 1925, 1926, 1927, 1928, 1929, 1930, 1931, 1932, 1933, 1934, 1935, 1936, 1937, 1938, 1939, 1940, 1941, 1942, 1943, 1944, 1945, 1946, 1947, 1948, 1949, 1950, 1951, 1952, 1953, 1954, 1955, 1956, 1957, 1958, 1959, 1960, 1961, 1962, 1963, 1964, 1965, 1966, 1967, 1968, 1969, 1970, 1971, 1972, 1973, 1974, 1975, 1976, 1977, 1978, 1979, 1980, 1981, 1982, 1983, 1984, 1985, 1986, 1987, 1988, 1989, 1990, 1991, 1992, 1993, 1994, 1995, 1996, 1997, 1998, 1999, 2000, 2001, 2002, 2003, 2004, 2005, 2006, 2007, 2008, 2009, 2010, 2011, 2012, 2013, 2014, 2015, 2016, 2017, 2018, 2019, 2020, 2021, 2022, 2023, 2024, 2025, 2026, 2027, 2028, 2029, 2030, 2031, 2032, 2033, 2034, 2035, 2036, 2037, 2038, 2039, 2040, 2041, 2042, 2043, 2044, 2045, 2046, 2047, 2048, 2049, 2050, 2051, 2052, 2053, 2054, 2055, 2056, 2057, 2058, 2059, 2060, 2061, 2062, 2063, 2064, 2065, 2066, 2067, 2068, 2069, 2070, 2071, 2072, 2073, 2074, 2075, 2076, 2077, 2078, 2079, 2080, 2081, 2082, 2083, 2084, 2085, 2086, 2087, 2088, 2089, 2090, 2091, 2092, 2093, 2094, 2095, 2096, 2097, 2098, 2099, 2100, 2101, 2102, 2103, 2104, 2105, 2106, 2107, 2108, 2109, 2110, 2111, 2112, 2113, 2114, 2115, 2116, 2117, 2118, 2119, 2120, 2121, 2122, 2123, 2124, 2125, 2126, 2127, 2128, 2129, 2130, 2131, 2132, 2133, 2134, 2135, 2136, 2137, 2138, 2139, 2140, 2141, 2142, 2143, 2144, 2145, 2146, 2147, 2148, 2149, 2150, 2151, 2152, 2153, 2154, 2155, 2156, 2157, 2158, 2159, 2160, 2161, 2162, 2163, 2164, 2165, 2166, 2167, 2168, 2169, 2170, 2171, 2172, 2173, 2174, 2175, 2176, 2177, 2178, 2179, 2180, 2181, 2182, 2183, 2184, 2185, 2186, 2187, 2188, 2189, 2190, 2191, 2192, 2193, 21942195, 2196, 2197, 2198, 2199, 2200, 2201, 2202, 2203, 2204, 2205, 2206, 2207, 2208, 2209, 2210, 2211, 2212, 2213, 2214, 2215, 2216, 2217, 2218, 2219, 2220, 2221, 2222, 2223, 2224, 2225, 2226, 2227, 2228, 2229, 2230, 2231, 2232, 2233, 2234, 2235, 2236, 2237, 2238, 2239, 2240, 2241, 2242, 2243, 2244, 2245, 2246, 2247, 2248, 2249, 2250, 2251, 2252, 2253, 2254, 2255, 2256, 2257, 2258, 2259, 2260, 2261, 2262, 2263, 2264, 2265, 2266, 2267, 2268, 2269, 2270, 2271, 2272, 2273, 2274, 2275, 2276, 2277, 2278, 2279, 2280, 2281, 2282, 2283, 2284, 2285, 2286, 2287, 2288, 2289, 2290, 2291, 2292, 2293, 2294, 2295, 2296, 2297, 2298, 2299, 2300, 2301, 2302, 2303, 2304, 2305, 2306, 2307, 2308, 2309, 2310, 2311, 2312, 2313, 2314, 2315, 2316, 2317, 2318, 2319, 2320, 2321, 2322, 2323, 2324, 2325, 2326, 2327, 2328, 2329, 2330, 2331, 2332, 2333, 2334, 2335, 2336, 2337, 2338, 2339, 2340, 2341, 2342, 2343, 2344, 2345, 2346, 2347, 2348, 2349, 2350, 2351, 2352, 2353, 2354, 2355, 2356, 2357, 2358, 2359, 2360, 2361, 2362, 2363, 2364, 2365, 2366, 2367, 2368, 2369, 2370, 2371, 2372, 2373, 2374, 2375, 2376, 2377, 2378, 2379, 2380, 2381, 2382, 2383, 2384, 2385, 2386, 2387, 2388, 2389, 2390, 2391, 2392, 2393, 2394, 2395, 2396, 2397, 2398, 2399, 2400, 2401, 2402, 2403, 2404, 2405, 2406, 2407, 2408, 2409, 2410, 2411, 2412, 2413, 2414, 2415, 2416, 2417, 2418, 2419, 2420, 2421, 2422, 2423, 2424, 2425, 2426, 2427, 2428, 2429, 2430, 2431, 2432, 2433, 2434, 2435, 2436, 2437, 2438, 2439, 2440, 2441, 2442, 2443, 2444, 2445, 2446, 2447, 2448, 2449, 2450, 2451, 2452, 2453, 2454, 2455, 2456, 2457, 2458, 2459, 2460, 2461, 2462, 2463, 2464, 2465, 2466, 2467, 2468, 2469, 2470, 2471, 2472, 2473, 2474, 2475, 2476, 2477, 2478, 2479, 2480, 2481, 2482, 2483, 2484, 2485, 2486, 2487, 2488, 2489, 2490, 2491, 2492, 2493, 2494, 2495, 2496, 2497, 2498, 2499, 2500, 2501, 2502, 2503, 2504, 2505, 2506, 2507, 2508, 2509, 2510, 2511, 2512, 2513, 2514, 2515, 2516, 2517, 2518, 2519, 2520, 2521, 2522, 2523, 2524, 2525, 2526, 2527, 2528, 2529, 2530, 2531, 2532, 2533, 2534, 2535, 2536, 2537, 2538, 2539, 2540, 2541, 2542, 2543, 2544, 2545, 2546, 2547, 2548, 2549, 2550, 2551, 2552, 2553, 2554, 2555, 2556, 2557, 2558, 2559, 2560, 2561, 2562, 2563, 2564, 2565, 2566, 2567, 2568, 2569, 2570, 2571, 2572, 2573, 2574, 2575, 2576, 2577, 2578, 2579, 2580, 2581, 2582, 2583, 2584, 2585, 2586, 2587, 2588, 2589, 2590, 2591, 2592, 2593, 2594, 2595, 2596, 2597, 2598, 2599, 2600, 2601, 2602, 2603, 2604, 2605, 2606, 2607, 2608, 2609, 2610, 2611, 2612, 2613, 2614, 2615, 2616, 2617, 2618, 2619, 2620, 2621, 2622, 2623, 2624, 2625, 2626, 2627, 2628, 2629, 2630, 2631, 2632, 2633, 2634, 2635, 2636, 2637, 2638, 2639, 2640, 2641, 2642, 2643, 2644, 2645, 2646, 2647, 2648, 2649, 2650, 2651, 2652, 2653, 2654, 2655, 2656, 2657, 2658, 2659, 2660, 2661, 2662, 2663, 2664, 2665, 2666, 2667, 2668, 2669, 2670, 2671, 2672, 2673, 2674, 2675, 2676, 2677, 2678, 2679, 2680, 2681, 2682, 2683, 2684, 2685, 2686, 2687, 2688, 2689, 2690, 2691, 2692, 2693, 2694, 2695, 2696, 2697, 2698, 2699, 2700, 2701, 2702, 2703, 2704, 2705, 2706, 2707, 2708, 2709, 2710, 2711, 2712, 2713, 2714, 2715, 2716, 2717, 2718, 2719, 2720, 2721, 2722, 2723, 2724, 2725, 2726, 2727, 2728, 2729, 2730, 2731, 2732, 2733, 2734, 2735, 2736, 2737, 2738, 2739, 2740, 2741, 2742, 2743, 2744, 2745, 2746, 2747, 2748, 2749, 2750, 2751, 2752, 2753, 2754, 2755, 2756, 2757, 2758, 2759, 2760, 2761, 2762, 2763, 2764, 2765, 2766, 2767, 2768, 2769, 2770, 2771, 2772, 2773, 2774, 2775, 2776, 2777, 2778, 2779, 2780, 2781, 2782, 2783, 2784, 2785, 2786, 2787, 2788, 2789, 2790, 2791, 2792, 2793, 2794, 2795, 2796, 2797, 2798, 2799, 2800, 2801, 2802, 2803, 2804, 2805, 2806, 2807, 2808, 2809, 2810, 2811, 2812, 2813, 2814, 2815, 2816, 2817, 2818, 2819, 2820, 2821, 2822, 2823, 2824, 2825, 2826, 2827, 2828, 2829, 2830, 2831, 2832, 2833, 2834, 2835, 2836, 2837, 2838, 2839, 2840, 2841, 2842, 2843, 2844, 2845, 2846, 2847, 2848, 2849, 2850, 2851, 2852, 2853, 2854, 2855, 2856, 2857, 2858, 2859, 2860, 2861, 2862, 2863, 2864, 2865, 2866, 2867, 2868, 2869, 2870, 2871, 2872, 2873, 2874, 2875, 2876, 2877, 2878, 2879, 2880, 2881, 2882, 2883, 2884, 2885, 2886, 2887, 2888, 2889, 2890, 2891, 2892, 2893, 2894, 2895, 2896, 2897, 2898, 2899, 2900, 2901, 2902, 2903, 2904, 2905, 2906, 2907, 2908, 2909, 2910, 2911, 2912, 2913, 2914, 2915, 2916, 2917, 2918, 2919, 2920, 2921, 2922, 2923, 2924, 2925, 2926, 2927, 2928, 2929, 2930, 2931, 2932, 2933, 2934, 2935, 2936, 2937, 2938, 2939, 2940, 2941, 2942, 2943, 2944, 2945, 2946, 2947, 2948, 2949, 2950, 2951, 2952, 2953, 2954, 2955, 2956, 2957, 2958, 2959, 2960, 2961, 2962, 2963, 2964, 2965, 2966, 2967, 2968, 2969, 2970, 2971, 2972, 2973, 2974, 2975, 2976, 2977, 2978, 2979, 2980, 2981, 2982, 2983, 2984, 2985, 2986, 2987, 2988, 2989, 2990, 2991, 2992, 2993, 2994, 2995, 2996, 2997, 2998, 2999, 3000, 3001, 3002, 3003, 3004, 3005, 3006, 3007, 3008, 3009, 3010, 3011, 3012, 3013, 3014, 3015, 3016, 3017, 3018, 3019, 3020, 3021, 3022, 3023, 3024, 3025, 3026, 3027, 3028, 3029, 3030, 3031, 3032, 3033, 3034, 3035, 3036, 3037, 3038, 3039, 3040, 3041, 3042, 3043, 3044, 3045, 3046, 3047, 3048, 3049, 3050, 3051, 3052, 3053, 3054, 3055, 3056, 3057, 3058, 3059, 3060, 3061, 3062, 3063, 3064, 3065, 3066, 3067, 3068, 3069, 3070, 3071, 3072, 3073, 3074, 3075, 3076, 3077, 3078, 3079, 3080, 3081, 3082, 3083, 3084, 3085, 3086, 3087, 3088, 3089, 3090, 3091, 3092, 3093, 3094, 3095, 3096, 3097, 3098, 3099, 3100, 3101, 3102, 3103, 3104, 3105, 3106, 3107, 3108, 3109, 3110, 3111, 3112, 3113, 3114, 3115, 3116, 3117, 3118, 3119, 3120, 3121, 3122, 3123, 3124, 3125, 3126, 3127, 3128, 3129, 3130, 3131, 3132, 3133, 3134, 3135, 3136, 3137, 3138, 3139, 3140, 3141, 3142, 3143, 3144, 3145, 3146, 3147, 3148, 3149, 3150, 3151, 3152, 3153, 3154, 3155, 3156, 3157, 3158, 3159, 3160, 3161, 3162, 3163, 3164, 3165, 3166, 3167, 3168, 3169, 3170, 3171, 3172, 3173, 3174, 3175, 3176, 3177, 3178, 3179, 3180, 3181, 3182, 3183, 3184, 3185, 3186, 3187, 3188, 3189, 3190, 3191, 3192, 3193, 3194, 3195, 3196, 3197, 3198, 3199, 3200, 3201, 3202, 3203, 3204, 3205, 3206, 3207, 3208, 3209, 3210, 3211, 3212, 3213, 3214, 3215, 3216, 3217, 3218, 3219, 3220, 3221, 3222, 3223, 3224, 3225, 3226, 3227, 3228, 3229, 3230, 3231, 3232, 3233, 3234, 3235, 3236, 3237, 3238, 3239, 3240, 3241, 3242, 3243, 3244, 3245, 3246, 3247, 3248, 3249, and 3250 nucleotides. The length of any filler region for the viral genome may be 50-100, 100-150, 150-200, 200-250, 250-300, 300-350, 350-400, 400-450, 450-500, 500-550, 550-600, 600-650, 650-700, 700-750, 750-800, 800-850, 850-900, 900-950, 950-1000, 1000-1050, 1050-1100, 1100-1150, 1150-1200, 1200-1250, 1250-1300, 1300-1350, 1350-1400, 1400-1450, 1450-1500, 1500-1550, 1550-1600, 1600-1650, 1650-1700, 1700-1750, 1750-1800, 1800-1850, 1850-1900, 1900-1950, 1950-2000, 2000-2050, 2050-2100, 2100-2150, 2150-2200, 2200-2250, 2250-2300, 2300-2350, 2350-2400, 2400-2450, 2450-2500, 2500-2550, 2550-2600, 2600-2650, 2650-2700, 2700-2750, 2750-2800, 2800-2850, 2850-2900, 2900-2950, 2950-3000, 3000-3050, 3050-3100, 3100-3150, 3150-3200, and 3200-3250 nucleotides. As a non-limiting example, the viral genome comprises a filler region that is about 55 nucleotides in length. As a non-limiting example, the viral genome comprises a filler region that is about 56 nucleotides in length. As a non-limiting example, the viral genome comprises a filler region that is about 97 nucleotides in length. As a non-limiting example, the viral genome comprises a filler region that is about 103 nucleotides in length. As a non-limiting example, the viral genome comprises a filler region that is about 105 nucleotides in length. As a non-limiting example, the viral genome comprises a filler region that is about 357 nucleotides in length. As a non-limiting example, the viral genome comprises a filler region that is about 363 nucleotides in length. As a non-limiting example, the viral genome comprises a filler region that is about 712 nucleotides in length. As a non-limiting example, the viral genome comprises a filler region that is about 714 nucleotides in length. As a non-limiting example, the viral genome comprises a filler region that is about 1203 nucleotides in length. As a non-limiting example, the viral genome comprises a filler region that is about 1209 nucleotides in length. As a non-limiting example, the viral genome comprises a filler region that is about 1512 nucleotides in length. As a non-limiting example, the viral genome comprises a filler region that is about 1519 nucleotides in length. As a non-limiting example, the viral genome comprises a filler region that is about 2395 nucleotides in length. As a non-limiting example, the viral genome comprises a filler region that is about 2403 nucleotides in length. As a non-limiting example, the viral genome comprises a filler region that is about 2405 nucleotides in length. As a non-limiting example, the viral genome comprises a filler region that is about 3013 nucleotides in length. As a non-limiting example, the viral genome comprises a filler region that is about 3021 nucleotides in length.

[0541] In one embodiment, the AAV particle viral genome may comprise at least one multiple filler sequence region. The filler region(s) may, independently, have a length such as, but not limited to, 50, 51, 52, 53, 54, 55, 56, 57, 58, 59, 60, 61, 62, 63, 64, 65, 66, 67, 68, 69, 70, 71, 72, 73, 74, 75, 76, 77, 78, 79, 80, 81, 82, 83, 84, 85, 86, 87, 88, 89, 90, 91, 92, 93, 94, 95, 96, 97, 98, 99, 100, 101, 102, 103, 104, 105, 106, 107, 108, 109, 110, 111, 112, 113, 114, 115, 116, 117, 118, 119, 120, 121, 122, 123, 124, 125, 126, 127, 128, 129, 130, 131, 132, 133, 134, 135, 136, 137, 138, 139, 140, 141, 142, 143, 144, 145, 146, 147, 148, 149, 150, 151, 152, 153, 154, 155, 156, 157, 158, 159, 160, 161, 162, 163, 164, 165, 166, 167, 168, 169, 170, 171, 172, 173, 174, 175, 176, 177, 178, 179, 180, 181, 182, 183, 184, 185, 186, 187, 188, 189, 190, 191, 192, 193, 194, 195, 196, 197, 198, 199, 200, 201, 202, 203, 204, 205, 206, 207, 208, 209, 210, 211, 212, 213, 214, 215, 216, 217, 218, 219, 220, 221, 222, 223, 224, 225, 226, 227, 228, 229, 230, 231, 232, 233, 234, 235, 236, 237, 238, 239, 240, 241, 242, 243, 244, 245, 246, 247, 248, 249, 250, 251, 252, 253, 254, 255, 256, 257, 258, 259, 260, 261, 262, 263, 264, 265, 266, 267, 268, 269, 270, 271, 272, 273, 274, 275, 276, 277, 278, 279, 280, 281, 282, 283, 284, 285, 286, 287, 288, 289, 290, 291, 292, 293, 294, 295, 296, 297, 298, 299, 300, 301, 302, 303, 304, 305, 306, 307, 308, 309, 310, 311, 312, 313, 314, 315, 316, 317, 318, 319, 320, 321, 322, 323, 324, 325, 326, 327, 328, 329, 330, 331, 332, 333, 334, 335, 336, 337, 338, 339, 340, 341, 342, 343, 344, 345, 346, 347, 348, 349, 350, 351, 352, 353, 354, 355, 356, 357, 358, 359, 360, 361, 362, 363, 364, 365, 366, 367, 368, 369, 370, 371, 372, 373, 374, 375, 376, 377, 378, 379, 380, 381, 382, 383, 384, 385, 386, 387, 388, 389, 390, 391, 392, 393, 394, 395, 396, 397, 398, 399, 400, 401, 402, 403, 404, 405, 406, 407, 408, 409, 410, 411, 412, 413, 414, 415, 416, 417, 418, 419, 420, 421, 422, 423, 424, 425, 426, 427, 428, 429, 430, 431, 432, 433, 434, 435, 436, 437, 438, 439, 440, 441, 442, 443, 444, 445, 446, 447, 448, 449, 450, 451, 452, 453, 454, 455, 456, 457, 458, 459, 460, 461, 462, 463, 464, 465, 466, 467, 468, 469, 470, 471, 472, 473, 474, 475, 476, 477, 478, 479, 480, 481, 482, 483, 484, 485, 486, 487, 488, 489, 490, 491, 492, 493, 494, 495, 496, 497, 498, 499, 500, 501, 502, 503, 504, 505, 506, 507, 508, 509, 510, 511, 512, 513, 514, 515, 516, 517, 518, 519, 520, 521, 522, 523, 524, 525, 526, 527, 528, 529, 530, 531, 532, 533, 534, 535, 536, 537, 538, 539, 540, 541, 542, 543, 544, 545, 546, 547, 548, 549, 550, 551, 552, 553, 554, 555, 556, 557, 558, 559, 560, 561, 562, 563, 564, 565, 566, 567, 568, 569, 570, 571, 572, 573, 574, 575, 576, 577, 578, 579, 580, 581, 582, 583, 584, 585, 586, 587, 588, 589, 590, 591, 592, 593, 594, 595, 596, 597, 598, 599, 600, 601, 602, 603, 604, 605, 606, 607, 608, 609, 610, 611, 612, 613, 614, 615, 616, 617, 618, 619, 620, 621, 622, 623, 624, 625, 626, 627, 628, 629, 630, 631, 632, 633, 634, 635, 636, 637, 638, 639, 640, 641, 642, 643, 644, 645, 646, 647, 648, 649, 650, 651, 652, 653, 654, 655, 656, 657, 658, 659, 660, 661, 662, 663, 664, 665, 666, 667, 668, 669, 670, 671, 672, 673, 674, 675, 676, 677, 678, 679, 680, 681, 682, 683, 684, 685, 686, 687, 688, 689, 690, 691, 692, 693, 694, 695, 696, 697, 698, 699, 700, 701, 702, 703, 704, 705, 706, 707, 708, 709, 710, 711, 712, 713, 714, 715, 716, 717, 718, 719, 720, 721, 722, 723, 724, 725, 726, 727, 728, 729, 730, 731, 732, 733, 734, 735, 736, 737, 738, 739, 740, 741, 742, 743, 744, 745, 746, 747, 748, 749, 750, 751, 752, 753, 754, 755, 756, 757, 758, 759, 760, 761, 762, 763, 764, 765, 766, 767, 768, 769, 770, 771, 772, 773, 774, 775, 776, 777, 778, 779, 780, 781, 782, 783, 784, 785, 786, 787, 788, 789, 790, 791, 792, 793, 794, 795, 796, 797, 798, 799, 800, 801, 802, 803, 804, 805, 806, 807, 808, 809, 810, 811, 812, 813, 814, 815, 816, 817, 818, 819, 820, 821, 822, 823, 824, 825, 826, 827, 828, 829, 830, 831, 832, 833, 834, 835, 836, 837, 838, 839, 840, 841, 842, 843, 844, 845, 846, 847, 848, 849, 850, 851, 852, 853, 854, 855, 856, 857, 858, 859, 860, 861, 862, 863, 864, 865, 866, 867, 868, 869, 870, 871, 872, 873, 874, 875, 876, 877, 878, 879, 880, 881, 882, 883, 884, 885, 886, 887, 888, 889, 890, 891, 892, 893, 894, 895, 896, 897, 898, 899, 900, 901, 902, 903, 904, 905, 906, 907, 908, 909, 910, 911, 912, 913, 914, 915, 916, 917, 918, 919, 920, 921, 922, 923, 924, 925, 926, 927, 928, 929, 930, 931, 932, 933, 934, 935, 936, 937, 938, 939, 940, 941, 942, 943, 944, 945, 946, 947, 948, 949, 950, 951, 952, 953, 954, 955, 956, 957, 958, 959, 960, 961, 962, 963, 964, 965, 966, 967, 968, 969, 970, 971, 972, 973, 974, 975, 976, 977, 978, 979, 980, 981, 982, 983, 984, 985, 986, 987, 988, 989, 990, 991, 992, 993, 994, 995, 996, 997, 998, 999, 1000, 1001, 1002, 1003, 1004, 1005, 1006, 1007, 1008, 1009, 1010, 1011, 1012, 1013, 1014, 1015, 1016, 1017, 1018, 1019, 1020, 1021, 1022, 1023, 1024, 1025, 1026, 1027, 1028, 1029, 1030, 1031, 1032, 1033, 1034, 1035, 1036, 1037, 1038, 1039, 1040, 1041, 1042, 1043, 1044, 1045, 1046, 1047, 1048, 1049, 1050, 1051, 1052, 1053, 1054, 1055, 1056, 1057, 1058, 1059, 1060, 1061, 1062, 1063, 1064, 1065, 1066, 1067, 1068, 1069, 1070, 1071, 1072, 1073, 1074, 1075, 1076, 1077, 1078, 1079, 1080, 1081, 1082, 1083, 1084, 1085, 1086, 1087, 1088, 1089, 1090, 1091, 1092, 1093, 1094, 1095, 1096, 1097, 1098, 1099, 1100, 1101, 1102, 1103, 1104, 1105, 1106, 1107, 1108, 1109, 1110, 1111, 1112, 1113, 1114, 1115, 1116, 1117, 1118, 1119, 1120, 1121, 1122, 1123, 1124, 1125, 1126, 1127, 1128, 1129, 1130, 1131, 1132, 1133, 1134, 1135, 1136, 1137, 1138, 1139, 1140, 1141, 1142, 1143, 1144, 1145, 1146, 1147, 1148, 1149, 1150, 1151, 1152, 1153, 1154, 1155, 1156, 1157, 1158, 1159, 1160, 1161, 1162, 1163, 1164, 1165, 1166, 1167, 1168, 1169, 1170, 1171, 1172, 1173, 1174, 1175, 1176, 1177, 1178, 1179, 1180, 1181, 1182, 1183, 1184, 1185, 1186, 1187, 1188, 1189, 1190, 1191, 1192, 1193, 1194, 1195, 1196, 1197, 1198, 1199, 1200, 1201, 1202, 1203, 1204, 1205, 1206, 1207, 1208, 1209, 1210, 1211, 1212, 1213, 1214, 1215, 1216, 1217, 1218, 1219, 1220, 1221, 1222, 1223, 1224, 1225, 1226, 1227, 1228, 1229, 1230, 1231, 1232, 1233, 1234, 1235, 1236, 1237, 1238, 1239, 1240, 1241, 1242, 1243, 1244, 1245, 1246, 1247, 1248, 1249, 1250, 1251, 1252, 1253, 1254, 1255, 1256, 1257, 1258, 1259, 1260, 1261, 1262, 1263, 1264, 1265, 1266, 1267, 1268, 1269, 1270, 1271, 1272, 1273, 1274, 1275, 1276, 1277, 1278, 1279, 1280, 1281, 1282, 1283, 1284, 1285, 1286, 1287, 1288, 1289, 1290, 1291, 1292, 1293, 1294, 1295, 1296, 1297, 1298, 1299, 1300, 1301, 1302, 1303, 1304, 1305, 1306, 1307, 1308, 1309, 1310, 1311, 1312, 1313, 1314, 1315, 1316, 1317, 1318, 1319, 1320, 1321, 1322, 1323, 1324, 1325, 1326, 1327, 1328, 1329, 1330, 1331, 1332, 1333, 1334, 1335, 1336, 1337, 1338, 1339, 1340, 1341, 1342, 1343, 1344, 1345, 1346, 1347, 1348, 1349, 1350, 1351, 1352, 1353, 1354, 1355, 1356, 1357, 1358, 1359, 1360, 1361, 1362, 1363, 1364, 1365, 1366, 1367, 1368, 1369, 1370, 1371, 1372, 1373, 1374, 1375, 1376, 1377, 1378, 1379, 1380, 1381, 1382, 1383, 1384, 1385, 1386, 1387, 1388, 1389, 1390, 1391, 1392, 1393, 1394, 1395, 1396, 1397, 1398, 1399, 1400, 1401, 1402, 1403, 1404, 1405, 1406, 1407, 1408, 1409, 1410, 1411, 1412, 1413, 1414, 1415, 1416, 1417, 1418, 1419, 1420, 1421, 1422, 1423, 1424, 1425, 1426, 1427, 1428, 1429, 1430, 1431, 1432, 1433, 1434, 1435, 1436, 1437, 1438, 1439, 1440, 1441, 1442, 1443, 1444, 1445, 1446, 1447, 1448, 1449, 1450, 1451, 1452, 1453, 1454, 1455, 1456, 1457, 1458, 1459, 1460, 1461, 1462, 1463, 1464, 1465, 1466, 1467, 1468, 1469, 1470, 1471, 1472, 1473, 1474, 1475, 1476, 1477, 1478, 1479, 1480, 1481, 1482, 1483, 1484, 1485, 1486, 1487, 1488, 1489, 1490, 1491, 1492, 1493, 1494, 1495, 1496, 1497, 1498, 1499, 1500, 1501, 1502, 1503, 1504, 1505, 1506, 1507, 1508, 1509, 1510, 1511, 1512, 1513, 1514, 1515, 1516, 1517, 1518, 1519, 1520, 1521, 1522, 1523, 1524, 1525, 1526, 1527, 1528, 1529, 1530, 1531, 1532, 1533, 1534, 1535, 1536, 1537, 1538, 1539, 1540, 1541, 1542, 1543, 1544, 1545, 1546, 1547, 1548, 1549, 1550, 1551, 1552, 1553, 1554, 1555, 1556, 1557, 1558, 1559, 1560, 1561, 1562, 1563, 1564, 1565, 1566, 1567, 1568, 1569, 1570, 1571, 1572, 1573, 1574, 1575, 1576, 1577, 1578, 1579, 1580, 1581, 1582, 1583, 1584, 1585, 1586, 1587, 1588, 1589, 1590, 1591, 1592, 1593, 1594, 1595, 1596, 1597, 1598, 1599, 1600, 1601, 1602, 1603, 1604, 1605, 1606, 1607, 1608, 1609, 1610, 1611, 1612, 1613, 1614, 1615, 1616, 1617, 1618, 1619, 1620, 1621, 1622, 1623, 1624, 1625, 1626, 1627, 1628, 1629, 1630, 1631, 1632, 1633, 1634, 1635, 1636, 1637, 1638, 1639, 1640, 1641, 1642, 1643, 1644, 1645, 1646, 1647, 1648, 1649, 1650, 1651, 1652, 1653, 1654, 1655, 1656, 1657, 1658, 1659, 1660, 1661, 1662, 1663, 1664, 1665, 1666, 1667, 1668, 1669, 1670, 1671, 1672, 1673, 1674, 1675, 1676, 1677, 1678, 1679, 1680, 1681, 1682, 1683, 1684, 1685, 1686, 1687, 1688, 1689, 1690, 1691, 1692, 1693, 1694, 1695, 1696, 1697, 1698, 1699, 1700, 1701, 1702, 1703, 1704, 1705, 1706, 1707, 1708, 1709, 1710, 1711, 1712, 1713, 1714, 1715, 1716, 1717, 1718, 1719, 1720, 1721, 1722, 1723, 1724, 1725, 1726, 1727, 1728, 1729, 1730, 1731, 1732, 1733, 1734, 1735, 1736, 1737, 1738, 1739, 1740, 1741, 1742, 1743, 1744, 1745, 1746, 1747, 1748, 1749, 1750, 1751, 1752, 1753, 1754, 1755, 1756, 1757, 1758, 1759, 1760, 1761, 1762, 1763, 1764, 1765, 1766, 1767, 1768, 1769, 1770, 1771, 1772, 1773, 1774, 1775, 1776, 1777, 1778, 1779, 1780, 1781, 1782, 1783, 1784, 1785, 1786, 1787, 1788, 1789, 1790, 1791, 1792, 1793, 1794, 1795, 1796, 1797, 1798, 1799, 1800, 1801, 1802, 1803, 1804, 1805, 1806, 1807, 1808, 1809, 1810, 1811, 1812, 1813, 1814, 1815, 1816, 1817, 1818, 1819, 1820, 1821, 1822, 1823, 1824, 1825, 1826, 1827, 1828, 1829, 1830, 1831, 1832, 1833, 1834, 1835, 1836, 1837, 1838, 1839, 1840, 1841, 1842, 1843, 1844, 1845, 1846, 1847, 1848, 1849, 1850, 1851, 1852, 1853, 1854, 1855, 1856, 1857, 1858, 1859, 1860, 1861, 1862, 1863, 1864, 1865, 1866, 1867, 1868, 1869, 1870, 1871, 1872, 1873, 1874, 1875, 1876, 1877, 1878, 1879, 1880, 1881, 1882, 1883, 1884, 1885, 1886, 1887, 1888, 1889, 1890, 1891, 1892, 1893, 1894, 1895, 1896, 1897, 1898, 1899, 1900, 1901, 1902, 1903, 1904, 1905, 1906, 1907, 1908, 1909, 1910, 1911, 1912, 1913, 1914, 1915, 1916, 1917, 1918, 1919, 1920, 1921, 1922, 1923, 1924, 1925, 1926, 1927, 1928, 1929, 1930, 1931, 1932, 1933, 1934, 1935, 1936, 1937, 1938, 1939, 1940, 1941, 1942, 1943, 1944, 1945, 1946, 1947, 1948, 1949, 1950, 1951, 1952, 1953, 1954, 1955, 1956, 1957, 1958, 1959, 1960, 1961, 1962, 1963, 1964, 1965, 1966, 1967, 1968, 1969, 1970, 1971, 1972, 1973, 1974, 1975, 1976, 1977, 1978, 1979, 1980, 1981, 1982, 1983, 1984, 1985, 1986, 1987, 1988, 1989, 1990, 1991, 1992, 1993, 1994, 1995, 1996, 1997, 1998, 1999, 2000, 2001, 2002, 2003, 2004, 2005, 2006, 2007, 2008, 2009, 2010, 2011, 2012, 2013, 2014, 2015, 2016, 2017, 2018, 2019, 2020, 2021, 2022, 2023, 2024, 2025, 2026, 2027, 2028, 2029, 2030, 2031, 2032, 2033, 2034, 2035, 2036, 2037, 2038, 2039, 2040, 2041, 2042, 2043, 2044, 2045, 2046, 2047, 2048, 2049, 2050, 2051, 2052, 2053, 2054, 2055, 2056, 2057, 2058, 2059, 2060, 2061, 2062, 2063, 2064, 2065, 2066, 2067, 2068, 2069, 2070, 2071, 2072, 2073, 2074, 2075, 2076, 2077, 2078, 2079, 2080, 2081, 2082, 2083, 2084, 2085, 2086, 2087, 2088, 2089, 2090, 2091, 2092, 2093, 2094, 2095, 2096, 2097, 2098, 2099, 2100, 2101, 2102, 2103, 2104, 2105, 2106, 2107, 2108, 2109, 2110, 2111, 2112, 2113, 2114, 2115, 2116, 2117, 2118, 2119, 2120, 2121, 2122, 2123, 2124, 2125, 2126, 2127, 2128, 2129, 2130, 2131, 2132, 2133, 2134, 2135, 2136, 2137, 2138, 2139, 2140, 2141, 2142, 2143, 2144, 2145, 2146, 2147, 2148, 2149, 2150, 2151, 2152, 2153, 2154, 2155, 2156, 2157, 2158, 2159, 2160, 2161, 2162, 2163, 2164, 2165, 2166, 2167, 2168, 2169, 2170, 2171, 2172, 2173, 2174, 2175, 2176, 2177, 2178, 2179, 2180, 2181, 2182, 2183, 2184, 2185, 2186, 2187, 2188, 2189, 2190, 2191, 2192, 2193, 21942195, 2196, 2197, 2198, 2199, 2200, 2201, 2202, 2203, 2204, 2205, 2206, 2207, 2208, 2209, 2210, 2211, 2212, 2213, 2214, 2215, 2216, 2217, 2218, 2219, 2220, 2221, 2222, 2223, 2224, 2225, 2226, 2227, 2228, 2229, 2230, 2231, 2232, 2233, 2234, 2235, 2236, 2237, 2238, 2239, 2240, 2241, 2242, 2243, 2244, 2245, 2246, 2247, 2248, 2249, 2250, 2251, 2252, 2253, 2254, 2255, 2256, 2257, 2258, 2259, 2260, 2261, 2262, 2263, 2264, 2265, 2266, 2267, 2268, 2269, 2270, 2271, 2272, 2273, 2274, 2275, 2276, 2277, 2278, 2279, 2280, 2281, 2282, 2283, 2284, 2285, 2286, 2287, 2288, 2289, 2290, 2291, 2292, 2293, 2294, 2295, 2296, 2297, 2298, 2299, 2300, 2301, 2302, 2303, 2304, 2305, 2306, 2307, 2308, 2309, 2310, 2311, 2312, 2313, 2314, 2315, 2316, 2317, 2318, 2319, 2320, 2321, 2322, 2323, 2324, 2325, 2326, 2327, 2328, 2329, 2330, 2331, 2332, 2333, 2334, 2335, 2336, 2337, 2338, 2339, 2340, 2341, 2342, 2343, 2344, 2345, 2346, 2347, 2348, 2349, 2350, 2351, 2352, 2353, 2354, 2355, 2356, 2357, 2358, 2359, 2360, 2361, 2362, 2363, 2364, 2365, 2366, 2367, 2368, 2369, 2370, 2371, 2372, 2373, 2374, 2375, 2376, 2377, 2378, 2379, 2380, 2381, 2382, 2383, 2384, 2385, 2386, 2387, 2388, 2389, 2390, 2391, 2392, 2393, 2394, 2395, 2396, 2397, 2398, 2399, 2400, 2401, 2402, 2403, 2404, 2405, 2406, 2407, 2408, 2409, 2410, 2411, 2412, 2413, 2414, 2415, 2416, 2417, 2418, 2419, 2420, 2421, 2422, 2423, 2424, 2425, 2426, 2427, 2428, 2429, 2430, 2431, 2432, 2433, 2434, 2435, 2436, 2437, 2438, 2439, 2440, 2441, 2442, 2443, 2444, 2445, 2446, 2447, 2448, 2449, 2450, 2451, 2452, 2453, 2454, 2455, 2456, 2457, 2458, 2459, 2460, 2461, 2462, 2463, 2464, 2465, 2466, 2467, 2468, 2469, 2470, 2471, 2472, 2473, 2474, 2475, 2476, 2477, 2478, 2479, 2480, 2481, 2482, 2483, 2484, 2485, 2486, 2487, 2488, 2489, 2490, 2491, 2492, 2493, 2494, 2495, 2496, 2497, 2498, 2499, 2500, 2501, 2502, 2503, 2504, 2505, 2506, 2507, 2508, 2509, 2510, 2511, 2512, 2513, 2514, 2515, 2516, 2517, 2518, 2519, 2520, 2521, 2522, 2523, 2524, 2525, 2526, 2527, 2528, 2529, 2530, 2531, 2532, 2533, 2534, 2535, 2536, 2537, 2538, 2539, 2540, 2541, 2542, 2543, 2544, 2545, 2546, 2547, 2548, 2549, 2550, 2551, 2552, 2553, 2554, 2555, 2556, 2557, 2558, 2559, 2560, 2561, 2562, 2563, 2564, 2565, 2566, 2567, 2568, 2569, 2570, 2571, 2572, 2573, 2574, 2575, 2576, 2577, 2578, 2579, 2580, 2581, 2582, 2583, 2584, 2585, 2586, 2587, 2588, 2589, 2590, 2591, 2592, 2593, 2594, 2595, 2596, 2597, 2598, 2599, 2600, 2601, 2602, 2603, 2604, 2605, 2606, 2607, 2608, 2609, 2610, 2611, 2612, 2613, 2614, 2615, 2616, 2617, 2618, 2619, 2620, 2621, 2622, 2623, 2624, 2625, 2626, 2627, 2628, 2629, 2630, 2631, 2632, 2633, 2634, 2635, 2636, 2637, 2638, 2639, 2640, 2641, 2642, 2643, 2644, 2645, 2646, 2647, 2648, 2649, 2650, 2651, 2652, 2653, 2654, 2655, 2656, 2657, 2658, 2659, 2660, 2661, 2662, 2663, 2664, 2665, 2666, 2667, 2668, 2669, 2670, 2671, 2672, 2673, 2674, 2675, 2676, 2677, 2678, 2679, 2680, 2681, 2682, 2683, 2684, 2685, 2686, 2687, 2688, 2689, 2690, 2691, 2692, 2693, 2694, 2695, 2696, 2697, 2698, 2699, 2700, 2701, 2702, 2703, 2704, 2705, 2706, 2707, 2708, 2709, 2710, 2711, 2712, 2713, 2714, 2715, 2716, 2717, 2718, 2719, 2720, 2721, 2722, 2723, 2724, 2725, 2726, 2727, 2728, 2729, 2730, 2731, 2732, 2733, 2734, 2735, 2736, 2737, 2738, 2739, 2740, 2741, 2742, 2743, 2744, 2745, 2746, 2747, 2748, 2749, 2750, 2751, 2752, 2753, 2754, 2755, 2756, 2757, 2758, 2759, 2760, 2761, 2762, 2763, 2764, 2765, 2766, 2767, 2768, 2769, 2770, 2771, 2772, 2773, 2774, 2775, 2776, 2777, 2778, 2779, 2780, 2781, 2782, 2783, 2784, 2785, 2786, 2787, 2788, 2789, 2790, 2791, 2792, 2793, 2794, 2795, 2796, 2797, 2798, 2799, 2800, 2801, 2802, 2803, 2804, 2805, 2806, 2807, 2808, 2809, 2810, 2811, 2812, 2813, 2814, 2815, 2816, 2817, 2818, 2819, 2820, 2821, 2822, 2823, 2824, 2825, 2826, 2827, 2828, 2829, 2830, 2831, 2832, 2833, 2834, 2835, 2836, 2837, 2838, 2839, 2840, 2841, 2842, 2843, 2844, 2845, 2846, 2847, 2848, 2849, 2850, 2851, 2852, 2853, 2854, 2855, 2856, 2857, 2858, 2859, 2860, 2861, 2862, 2863, 2864, 2865, 2866, 2867, 2868, 2869, 2870, 2871, 2872, 2873, 2874, 2875, 2876, 2877, 2878, 2879, 2880, 2881, 2882, 2883, 2884, 2885, 2886, 2887, 2888, 2889, 2890, 2891, 2892, 2893, 2894, 2895, 2896, 2897, 2898, 2899, 2900, 2901, 2902, 2903, 2904, 2905, 2906, 2907, 2908, 2909, 2910, 2911, 2912, 2913, 2914, 2915, 2916, 2917, 2918, 2919, 2920, 2921, 2922, 2923, 2924, 2925, 2926, 2927, 2928, 2929, 2930, 2931, 2932, 2933, 2934, 2935, 2936, 2937, 2938, 2939, 2940, 2941, 2942, 2943, 2944, 2945, 2946, 2947, 2948, 2949, 2950, 2951, 2952, 2953, 2954, 2955, 2956, 2957, 2958, 2959, 2960, 2961, 2962, 2963, 2964, 2965, 2966, 2967, 2968, 2969, 2970, 2971, 2972, 2973, 2974, 2975, 2976, 2977, 2978, 2979, 2980, 2981, 2982, 2983, 2984, 2985, 2986, 2987, 2988, 2989, 2990, 2991, 2992, 2993, 2994, 2995, 2996, 2997, 2998, 2999, 3000, 3001, 3002, 3003, 3004, 3005, 3006, 3007, 3008, 3009, 3010, 3011, 3012, 3013, 3014, 3015, 3016, 3017, 3018, 3019, 3020, 3021, 3022, 3023, 3024, 3025, 3026, 3027, 3028, 3029, 3030, 3031, 3032, 3033, 3034, 3035, 3036, 3037, 3038, 3039, 3040, 3041, 3042, 3043, 3044, 3045, 3046, 3047, 3048, 3049, 3050, 3051, 3052, 3053, 3054, 3055, 3056, 3057, 3058, 3059, 3060, 3061, 3062, 3063, 3064, 3065, 3066, 3067, 3068, 3069, 3070, 3071, 3072, 3073, 3074, 3075, 3076, 3077, 3078, 3079, 3080, 3081, 3082, 3083, 3084, 3085, 3086, 3087, 3088, 3089, 3090, 3091, 3092, 3093, 3094, 3095, 3096, 3097, 3098, 3099, 3100, 3101, 3102, 3103, 3104, 3105, 3106, 3107, 3108, 3109, 3110, 3111, 3112, 3113, 3114, 3115, 3116, 3117, 3118, 3119, 3120, 3121, 3122, 3123, 3124, 3125, 3126, 3127, 3128, 3129, 3130, 3131, 3132, 3133, 3134, 3135, 3136, 3137, 3138, 3139, 3140, 3141, 3142, 3143, 3144, 3145, 3146, 3147, 3148, 3149, 3150, 3151, 3152, 3153, 3154, 3155, 3156, 3157, 3158, 3159, 3160, 3161, 3162, 3163, 3164, 3165, 3166, 3167, 3168, 3169, 3170, 3171, 3172, 3173, 3174, 3175, 3176, 3177, 3178, 3179, 3180, 3181, 3182, 3183, 3184, 3185, 3186, 3187, 3188, 3189, 3190, 3191, 3192, 3193, 3194, 3195, 3196, 3197, 3198, 3199, 3200, 3201, 3202, 3203, 3204, 3205, 3206, 3207, 3208, 3209, 3210, 3211, 3212, 3213, 3214, 3215, 3216, 3217, 3218, 3219, 3220, 3221, 3222, 3223, 3224, 3225, 3226, 3227, 3228, 3229, 3230, 3231, 3232, 3233, 3234, 3235, 3236, 3237, 3238, 3239, 3240, 3241, 3242, 3243, 3244, 3245, 3246, 3247, 3248, 3249, and 3250 nucleotides. The length of any filler region for the viral genome may be 50-100, 100-150, 150-200, 200-250, 250-300, 300-350, 350-400, 400-450, 450-500, 500-550, 550-600, 600-650, 650-700, 700-750, 750-800, 800-850, 850-900, 900-950, 950-1000, 1000-1050, 1050-1100, 1100-1150, 1150-1200, 1200-1250, 1250-1300, 1300-1350, 1350-1400, 1400-1450, 1450-1500, 1500-1550, 1550-1600, 1600-1650, 1650-1700, 1700-1750, 1750-1800, 1800-1850, 1850-1900, 1900-1950, 1950-2000, 2000-2050, 2050-2100, 2100-2150, 2150-2200, 2200-2250, 2250-2300, 2300-2350, 2350-2400, 2400-2450, 2450-2500, 2500-2550, 2550-2600, 2600-2650, 2650-2700, 2700-2750, 2750-2800, 2800-2850, 2850-2900, 2900-2950, 2950-3000, 3000-3050, 3050-3100, 3100-3150, 3150-3200, and 3200-3250 nucleotides. As a non-limiting example, the viral genome comprises a filler region that is about 55 nucleotides in length. As a non-limiting example, the viral genome comprises a filler region that is about 56 nucleotides in length. As a non-limiting example, the viral genome comprises a filler region that is about 97 nucleotides in length. As a non-limiting example, the viral genome comprises a filler region that is about 103 nucleotides in length. As a non-limiting example, the viral genome comprises a filler region that is about 105 nucleotides in length. As a non-limiting example, the viral genome comprises a filler region that is about 357 nucleotides in length. As a non-limiting example, the viral genome comprises a filler region that is about 363 nucleotides in length. As a non-limiting example, the viral genome comprises a filler region that is about 712 nucleotides in length. As a non-limiting example, the viral genome comprises a filler region that is about 714 nucleotides in length. As a non-limiting example, the viral genome comprises a filler region that is about 1203 nucleotides in length. As a non-limiting example, the viral genome comprises a filler region that is about 1209 nucleotides in length. As a non-limiting example, the viral genome comprises a filler region that is about 1512 nucleotides in length. As a non-limiting example, the viral genome comprises a filler region that is about 1519 nucleotides in length. As a non-limiting example, the viral genome comprises a filler region that is about 2395 nucleotides in length. As a non-limiting example, the viral genome comprises a filler region that is about 2403 nucleotides in length. As a non-limiting example, the viral genome comprises a filler region that is about 2405 nucleotides in length. As a non-limiting example, the viral genome comprises a filler region that is about 3013 nucleotides in length. As a non-limiting example, the viral genome comprises a filler region that is about 3021 nucleotides in length.

[0542] In one embodiment, the AAV particle viral genome comprises at least one filler sequence regions. Non-limiting examples of filler sequence regions are described in Table 12.

TABLE 12
Filler Sequence Regions

| Sequence Region Name | SEQ ID NO |
|---|---|
| FILL1 | 1379 |
| FILL2 | 1380 |
| FILL3 | 1381 |
| FILL4 | 1382 |
| FILL5 | 1383 |
| FILL6 | 1384 |
| F1LL7 | 1385 |
| FILL8 | 1386 |
| FILL9 | 1387 |
| FILL10 | 1388 |
| FILL11 | 1389 |
| FILL12 | 1390 |
| FILL13 | 1391 |
| FILL14 | 1392 |
| FILL15 | 1393 |
| FILL16 | 1394 |
| FILL17 | 1395 |
| FILL18 | 1396 |

[0543] In one embodiment, the AAV particle viral genome comprises one filler sequence region. In one embodiment, the filler sequence region is the FILL1 sequence region. In one embodiment, the filler sequence region is the FILL2 sequence region. In one embodiment, the filler sequence region is the FILL3 sequence region. In one embodiment, the filler sequence region is the FILL4 sequence region. In one embodiment, the filler sequence region is the FILL5 sequence region. In one embodiment, the filler sequence region is the FILL6 sequence region. In one embodiment, the filler sequence region is the FILL7 sequence region. In one embodiment, the filler sequence region is the FILL8 sequence region. In one embodiment, the filler sequence region is the FILL9 sequence region. In one embodiment, the filler sequence region is the FILL10 sequence region. In one embodiment, the filler sequence region is the FILL11 sequence region. In one embodiment, the filler sequence region is the FILL12 sequence region. In one embodiment, the filler sequence region is the FILL13 sequence region. In one embodiment, the filler sequence region is the FILL14 sequence region. In one embodiment, the filler sequence region is the FILL15 sequence region. In one embodiment, the filler sequence region is the FILL16 sequence region. In one embodiment, the filler sequence region is the FILL17 sequence region. In one embodiment, the filler sequence region is the FILL18 sequence region.

[0544] In one embodiment, the AAV particle viral genome comprises two filler sequence regions. In one embodiment, the two filler sequence regions are the FILL1 sequence region, and the FILL2 sequence region. In one embodiment, the filler sequence region is the FILL1 sequence region, and the FILL3 sequence region. In one embodiment, the filler sequence region is the FILL1 sequence region, and the FILL4 sequence region. In one embodiment, the filler sequence region is the FILL1 sequence region, and the FILL5 sequence region. In one embodiment, the filler sequence region is the FILL1 sequence region, and the FILL6 sequence region. In one embodiment, the filler sequence region is the FILL1 sequence region, and the FILL7 sequence region. In one embodiment, the filler sequence region is the FILL1 sequence region, and the FILL8 sequence region. In one embodiment, the filler sequence region is the FILL1 sequence region, and the FILL9 sequence region. In one embodiment, the filler sequence region is the FILL1 sequence region, and the FILL10 sequence region. In one embodiment, the filler sequence region is the FILL1 sequence region, and the FILL11 sequence region. In one embodiment, the filler sequence region is the FILL1 sequence region, and the FILL12 sequence region. In one embodiment, the filler sequence region is the FILL1 sequence region, and the FILL13 sequence region. In one embodiment, the filler sequence region is the FILL1 sequence region, and the FILL14 sequence region. In one embodiment, the filler sequence region is the FILL1 sequence region, and the FILL15 sequence region. In one embodiment, the filler sequence region is the FILL1 sequence region, and the FILL16 sequence region. In one embodiment, the filler sequence region is the FILL1 sequence region, and the FILL17 sequence region. In one embodiment, the filler sequence region is the FILL1 sequence region, and the FILL18 sequence region. In one embodiment, the filler sequence region is the FILL2 sequence region, and the FILL3 sequence region. In one embodiment, the filler sequence region is the FILL3 sequence region, and the FILL4 sequence region. In one embodiment, the filler sequence region is the FILL3 sequence region, and the FILL5 sequence region. In one embodiment, the filler sequence region is the FILL3 sequence region, and the FILL6 sequence region. In one embodiment, the filler sequence region is the FILL3 sequence region, and the FILL7 sequence region. In one embodiment, the filler sequence region is the FILL3 sequence region, and the FILL8 sequence region. In one embodiment, the filler sequence region is the FILL3 sequence region, and the FILL9 sequence region. In one embodiment, the filler sequence region is the FILL3 sequence region, and the FILL10 sequence region. In one embodiment, the filler sequence region is the FILL3 sequence region, and the FILL11 sequence region. In one embodiment, the filler sequence region is the FILL3 sequence region, and the FILL12 sequence region. In one embodiment, the filler sequence region is the FILL3 sequence region, and the FILL13 sequence region. In one embodiment, the filler sequence region is the FILL3 sequence region, and the FILL14 sequence region. In one embodiment, the filler sequence region is the FILL3 sequence region, and the FILL15 sequence region. In one embodiment, the filler sequence region is the FILL3 sequence region, and the FILL16 sequence region. In one embodiment, the filler sequence region is the FILL3 sequence region, and the FILL17 sequence region. In one embodiment, the filler sequence region is the FILL3 sequence region, and the FILL18 sequence region. In one embodiment, the filler sequence region is the FILL4 sequence region, and the FILL5 sequence region. In one embodiment, the filler sequence region is the FILL4 sequence region, and the FILL6 sequence region. In one embodiment, the filler sequence region is the FILL4 sequence region, and the FILL7 sequence region. In one embodiment, the filler sequence region is the FILL4 sequence region, and the FILL8 sequence region. In one embodiment, the filler sequence region is the FILL4 sequence region, and the FILL9 sequence region. In one embodiment, the filler sequence region is the FILL4 sequence region, and the FILL10 sequence region. In one embodiment, the filler sequence region is the FILL4 sequence region, and the FILL11 sequence region. In one embodiment, the filler sequence region is the FILL4 sequence region, and the FILL12 sequence region. In one embodiment, the filler sequence region is the FILL4 sequence region, and the FILL13 sequence region. In one embodiment, the filler sequence region is the FILL4 sequence region, and the FILL14 sequence region. In one embodiment, the filler sequence region is the FILM sequence region, and the FILL15 sequence region. In one embodiment, the filler sequence region is the FILL4 sequence region, and the FILL16 sequence region. In one embodiment, the filler sequence region is the FILL4 sequence region, and the FILL17 sequence region. In one embodiment, the filler sequence region is the FILL4 sequence region, and the FILL18 sequence region. In one embodiment, the filler sequence region is the FILL5 sequence region, and the FILL6 sequence region. In one embodiment, the filler sequence region is the FILL5 sequence region, and the FILL7 sequence region. In one embodiment, the filler sequence region is the FILL5 sequence region, and the FILL8 sequence region. In one embodiment, the filler sequence region is the FILL5 sequence region, and the FILL9 sequence region. In one embodiment, the filler sequence region is the FILL5 sequence region, and the FILL10 sequence region. In one embodiment, the filler sequence region is the FILL5 sequence region, and the FILL11 sequence region. In one embodiment, the filler sequence region is the FILL5 sequence region, and the FILL12 sequence region. In one embodiment, the filler sequence region is the FILL5 sequence region, and the FILL13 sequence region. In one embodiment, the filler sequence region is the FILL5 sequence region, and the FILL14 sequence region. In one embodiment, the filler sequence region is the FILL5 sequence region, and the FILL15 sequence region. In one embodiment, the filler sequence region is the FILL5 sequence region, and the FILL16 sequence region. In one embodiment, the filler sequence region is the FILL5 sequence region, and the FILL17 sequence region. In one embodiment, the filler sequence region is the FILL5 sequence region, and the FILL18 sequence region. In one embodiment, the filler sequence region is the FILL6 sequence region, and the FILL7 sequence region. In one embodiment, the filler sequence region is the FILL6 sequence region, and the FILL8 sequence region. In one embodiment, the filler sequence region is the FILL6 sequence region, and the FILL9 sequence region. In one embodiment, the filler sequence region is the FILL6 sequence region, and the FILL10 sequence region. In one embodiment, the filler sequence region is the FILL6 sequence region, and the FILL11 sequence region. In one embodiment, the filler sequence region is the FILL6 sequence region, and the FILL12 sequence region. In one embodiment, the filler sequence region is the FILL6 sequence region, and the FILL13 sequence region. In one embodiment, the filler sequence region is the FILL6 sequence region, and the FILL14 sequence region. In one embodiment, the filler sequence region is the FILL6 sequence region, and the FILL15 sequence region. In one embodiment, the filler sequence region is the FILL6 sequence region, and the FILL16 sequence region. In one embodiment the filler sequence region is the FILL6 sequence region, and the FILL17 sequence region. In one embodiment, the filler sequence region is the FILL6 sequence region, and the FILL18 sequence region. In one embodiment, the filler sequence region is the FILL7 sequence region, and the FILL8 sequence region. In one embodiment, the filler sequence region is the FILL7 sequence region, and the FILL9 sequence region. In one embodiment, the filler sequence region is the FILL7 sequence region, and the FILL10 sequence region. In one embodiment, the filler sequence region is the FILL7 sequence region, and the FILL11 sequence region. In one embodiment the filler sequence region is the FILL7 sequence region, and the FILL12 sequence region. In one embodiment, the filler sequence region is the FILL7 sequence region, and the FILL13 sequence region. In one embodiment, the filler sequence region is the FILL7 sequence region, and the FILL14 sequence region. In one embodiment, the filler sequence region is the FILL7 sequence region, and the FILL15 sequence region. In one embodiment, the filler sequence region is the FILL7 sequence region, and the FILL16 sequence region. In one embodiment, the filler sequence region is the FILL7 sequence region, and the FILL17 sequence region. In one embodiment, the filler sequence region is the FILL7 sequence region, and the FILL18 sequence region. In one embodiment, the filler sequence region is the FILL8 sequence region, and the FILL9 sequence region. In one embodiment, the filler sequence region is the FILL8 sequence region, and the FILL10 sequence region. In one embodiment, the filler sequence region is the FILL8 sequence region, and the FILL1 sequence region. In one embodiment, the filler sequence region is the FILL8 sequence region, and the FILL12 sequence region. In one embodiment, the filler sequence region is the FILL8 sequence region, and the FILL13 sequence region. In one embodiment, the filler sequence region is the FILL5 sequence region, and the FILL14 sequence region. In one embodiment, the filler sequence region is the FILL8 sequence region, and the FILL15 sequence region. In one embodiment, the filler sequence region is the FILL5 sequence region, and the FILL16 sequence region. In one embodiment, the filler sequence region is the FILL8 sequence region, and the FILL17 sequence region. In one embodiment, the filler sequence region is the FILL5 sequence region, and the FILL18 sequence region. In one embodiment, the filler sequence region is the FILL9 sequence region, and the FILL10 sequence region. In one embodiment, the filler sequence region is the FILL9 sequence region, and the FILL11 sequence region. In one embodiment, the filler sequence region is the FILL9 sequence region, and the FILL12 sequence region. In one embodiment, the filler sequence region is the FILL9 sequence region, and the FILL13 sequence region. In one embodiment, the filler sequence region is the FILL9 sequence region, and the FILL14 sequence region. In one embodiment, the filler sequence region is the FILL9 sequence region, and the FILL15 sequence region. In one embodiment, the filler sequence region is the FILL9 sequence region, and the FILL16 sequence region. In one embodiment, the filler sequence region is the FILL9 sequence region, and the FILL17 sequence region. In one embodiment, the filler sequence region is the FILL9 sequence region, and the FILL18 sequence region. In one embodiment, the filler sequence region is the FILL10 sequence region, and the FILL11 sequence region. In one embodiment, the filler sequence region is the FILL10 sequence region, and the FILL12 sequence region. In one embodiment, the filler sequence region is the FILL10 sequence region, and the FILL13 sequence region. In one embodiment, the filler sequence region is the FILL10 sequence region, and the FILL14 sequence region. In one embodiment, the filler sequence region is the FILL10 sequence region, and the FILL15 sequence region. In one embodiment, the filler sequence region is the FILL10 sequence region, and the FILL16 sequence region. In one embodiment, the filler sequence region is the FILL10 sequence region, and the FILL17 sequence region. In one embodiment, the filler sequence region is the FILL10 sequence region, and the FILL18 sequence region. In one embodiment, the filler sequence region is the FILL11 sequence region, and the FILL12 sequence region. In one embodiment, the filler sequence region is the FILL11 sequence region, and the FILL13 sequence region. In one embodiment, the filler sequence region is the FILL11 sequence region, and the FILL14 sequence region. In one embodiment, the filler sequence region is the FILL11 sequence region, and the FILL15 sequence region. In one embodiment, the filler sequence region is the FILL11 sequence region, and the FILL16 sequence region. In one embodiment, the filler sequence region is the FILL11 sequence region, and the FILL17 sequence region. In one embodiment, the filler sequence region is the FILL11 sequence region, and the FILL18 sequence region. In one embodiment, the filler sequence region is the FILL12 sequence region, and the FILL13 sequence region. In one embodiment, the filler sequence region is the FILL12 sequence region, and the FILL14 sequence region. In one embodiment, the filler sequence region is the FILL12 sequence region, and the FILL15 sequence region. In one embodiment, the filler sequence region is the FILL12 sequence region, and the FILL16 sequence region. In one embodiment, the filler sequence region is the FILL12 sequence region, and the FILL17 sequence region. In one embodiment, the filler sequence region is the FILL12 sequence region, and the FILL18 sequence region. In one embodiment, the filler sequence region is the FILL13 sequence region, and the FILL14 sequence region. In one embodiment, the filler sequence region is the FILL13 sequence region, and the FILL15 sequence region. In one embodiment, the filler sequence region is the FILL13 sequence region, and the FILL16 sequence region. In one embodiment, the filler sequence region is the FILL13 sequence region, and the FILL17 sequence region. In one embodiment, the filler sequence region is the FILL13 sequence region, and the FILL18 sequence region. In one embodiment, the filler sequence region is the FILL14 sequence region, and the FILL15 sequence region. In one embodiment, the filler sequence region is the FILL14 sequence region, and the FILL16 sequence region. In one embodiment, the filler sequence region is the FILL14 sequence region, and the FILL17 sequence region. In one embodiment, the filler sequence region is the FILL14 sequence region, and the FILL18 sequence region. In one embodiment, the filler sequence region is the FILL15 sequence region, and the FILL16 sequence region. In one embodiment, the filler sequence region is the FILL5 sequence region, and the FILL17 sequence region. In one embodiment, the filler sequence region is the FILL15 sequence region, and the FILL18 sequence region. In one embodiment, the filler sequence region is the FILL16 sequence region, and the FILL17 sequence region. In one embodiment, the filler sequence region is the FILL16 sequence region, and the FILL18 sequence region. In one embodiment, the filler sequence region is the FILL17 sequence region, and the FILL18 sequence region.

[0545] In one embodiment, the AAV particle viral genome comprises three filler sequence regions. In one embodiment, the two filler sequence regions are the FILL1 sequence region, the FILL2 sequence region, and the FILL3 sequence region. In one embodiment, the filler sequence region is the FILL1 sequence region, the FILL2 sequence region, and the FILL4 sequence region. In one embodiment, the filler sequence region is the FILL1 sequence region, the FILL2 sequence region, and the FILL5 sequence region. In one embodiment, the filler sequence region is the FILL1 sequence region, the FILL2 sequence region, and the FILL6 sequence region. In one embodiment, the filler sequence region is the FILL1 sequence region, the FILL2 sequence region, and the FILL7 sequence region. In one embodiment, the filler sequence region is the FILL1 sequence region, the FILL2 sequence region, and the FILL8 sequence region. In one embodiment, the filler sequence region is the FILL1 sequence region, the FILL2 sequence region, and the FILL9 sequence region. In one embodiment, the filler sequence region is the FILL1 sequence region, the FILL2 sequence region, and the FILL10 sequence region. In one embodiment, the filler sequence region is the FILL1 sequence region, the FILL2 sequence region, and the FILL11 sequence region. In one embodiment, the filler sequence region is the FILL1 sequence region, the FILL2 sequence region, and the FILL12 sequence region. In one embodiment, the filler sequence region is the FILL1 sequence region, the FILL2 sequence region, and the FILL13 sequence region. In one embodiment, the filler sequence region is the FILL1 sequence region, the FILL2 sequence region, and the FILL14 sequence region. In one embodiment, the filler sequence region is the FILL1 sequence region, the FILL2 sequence region, and the FILL15 sequence region. In one embodiment, the filler sequence region is the FILL1 sequence region, the FILL2 sequence region, and the FILL16 sequence region. In one embodiment, the filler sequence region is the FILL1 sequence region, the FILL2 sequence region, and the FILL17 sequence region. In one embodiment, the filler sequence region is the FILL1 sequence region, the FILL2 sequence region, and the FILL18 sequence region. In one embodiment, the filler sequence region is the FILL1 sequence region, the FILL3 sequence region, and the FILL4 sequence region. In one embodiment, the filler sequence region is the FILL1 sequence region, the FILL3 sequence region, and the FILL5 sequence region. In one embodiment, the filler sequence region is the FILL1 sequence region, the FILL3 sequence region, and the FILL6 sequence region. In one embodiment, the filler sequence region is the FILL1 sequence region, the FILL3 sequence region, and the FILL7 sequence region. In one embodiment, the filler sequence region is the FILL1 sequence region, the FILL3 sequence region, and the FILL8 sequence region. In one embodiment, the filler sequence region is the FILL1 sequence region, the FILL3 sequence region, and the FILL9 sequence region. In one embodiment, the filler sequence region is the FILL1 sequence region, the FILL3 sequence region, and the FILL10 sequence region. In one embodiment, the filler sequence region is the FILL1 sequence region, the FILL3 sequence region, and the FILL11 sequence region. In one embodiment, the filler sequence region is the FILL1 sequence region, the FILL3 sequence region, and the FILL12 sequence region. In one embodiment, the filler sequence region is the FILL1 sequence region, the FILL3 sequence region, and the FILL13 sequence region. In one embodiment, the filler sequence region is the FILL1 sequence region, the FILL3 sequence region, and the FILL14 sequence region. In one embodiment, the filler sequence region is the FILL1 sequence region, the FILL3 sequence region, and the FILL15 sequence region. In one embodiment, the filler sequence region is the FILL1 sequence region, the FILL3 sequence region, and the FILL16 sequence region. In one embodiment, the filler sequence region is the FILL1 sequence region, the FILL3 sequence region, and the FILL17 sequence region. In one embodiment, the filler sequence region is the FILL1 sequence region, the FILL3 sequence region, and the FILL18 sequence region. In one embodiment, the filler sequence region is the FILL1 sequence region, the FILL4 sequence region, and the FILL5 sequence region. In one embodiment, the filler sequence region is the FILL1 sequence region, the FILL4 sequence region, and the FILL6 sequence region. In one embodiment, the filler sequence region is the FILL1 sequence region, the FILL4 sequence region, and the FILL7 sequence region. In one embodiment, the filler sequence region is the FILL1 sequence region, the FILL4 sequence region, and the FILL8 sequence region. In one embodiment, the filler sequence region is the FILL1 sequence region, the FILL4 sequence region, and the FILL9 sequence region. In one embodiment, the filler sequence region is the FILL1 sequence region, the FILL4 sequence region, and the FILL10 sequence region. In one embodiment, the filler sequence region is the FILL1 sequence region, the FILL4 sequence region, and the FILL11 sequence region. In one embodiment, the filler sequence region is the FILL1 sequence region, the FILL4 sequence region, and the FILL12 sequence region. In one embodiment, the filler sequence region is the FILL1 sequence region, the FILL4 sequence region, and the FILL13 sequence region. In one embodiment, the filler sequence region is the FILL1 sequence region, the FILL4 sequence region, and the FILL14 sequence region. In one embodiment, the filler sequence region is the FILL1 sequence region, the FILL4 sequence region, and the FILL15 sequence region. In one embodiment, the filler sequence region is the FILL1 sequence region, the FILL4 sequence region, and the FILL16 sequence region. In one embodiment, the filler sequence region is the FILL1 sequence region, the FILL4 sequence region, and the FILL17 sequence region. In one embodiment, the filler sequence region is the FILL1 sequence region, the FILL4 sequence region, and the FILL18 sequence region. In one embodiment, the filler sequence region is the FILL1 sequence region, the FILL5 sequence region, and the FILL6 sequence region. In one embodiment, the filler sequence region is the FILL1 sequence region, the FILL5 sequence region, and the FILL7 sequence region. In one embodiment, the filler sequence region is the FILL1 sequence region, the FILL5 sequence region, and the FILL8 sequence region. In one embodiment, the filler sequence region is the FILL1 sequence region, the FILL5 sequence region, and the FILL9 sequence region. In one embodiment, the filler sequence region is the FILL1 sequence region, the FILL5 sequence region, and the FILL10 sequence region. In one embodiment, the filler sequence region is the FILL1 sequence region, the FILL5 sequence region, and the FILL11 sequence region. In one embodiment, the filler sequence region is the FILL1 sequence region, the FILL5 sequence region, and the FILL12 sequence region. In one embodiment, the filler sequence region is the FILL1 sequence region, the FILL5 sequence region, and the FILL13 sequence region. In one embodiment, the filler sequence region is the FILL1 sequence region, the FILL5 sequence region, and the FILL14 sequence region. In one embodiment, the filler sequence region is the FILL1 sequence region, the FILL5 sequence region, and the FILL15 sequence region. In one embodiment, the filler sequence region is the FILL1 sequence region, the FILL5 sequence region, and the FILL16 sequence region. In one embodiment, the filler sequence region is the FILL1 sequence region, the FILL5 sequence region, and the FILL17 sequence region. In one embodiment, the filler sequence region is the FILL1 sequence region, the FILL5 sequence region, and the FILL18 sequence region. In one embodiment, the filler sequence region is the FILL1 sequence region, the FILL6 sequence region, and the FILL7 sequence region. In one embodiment, the filler sequence region is the FILL1 sequence region, the FILL6 sequence region, and the FILL8 sequence region. In one embodiment, the filler sequence region is the FILL1 sequence region, the FILL6 sequence region, and the FILL9 sequence region. In one embodiment, the filler sequence region is the FILL1 sequence region, the FILL6 sequence region, and the FILL10 sequence region. In one embodiment, the filler sequence region is the FILL1 sequence region, the FILL6 sequence region, and the FILL11 sequence region. In one embodiment, the filler sequence region is the FILL1 sequence region, the FILL6 sequence region, and the FILL12 sequence region. In one embodiment, the filler sequence region is the FILL1 sequence region, the FILL6 sequence region, and the FILL13 sequence region. In one embodiment, the filler sequence region is the FILL1 sequence region, the FILL6 sequence region, and the FILL14 sequence region. In one embodiment, the filler sequence region is the FILL1 sequence region, the FILL6 sequence region, and the FILL15 sequence region. In one embodiment, the filler sequence region is the FILL1 sequence region, the FILL6 sequence region, and the FILL16 sequence region. In one embodiment, the filler sequence region is the FILL1 sequence region, the FILL6 sequence region, and the FILL17 sequence region. In one embodiment, the filler sequence region is the FILL1 sequence region, the FILL6 sequence region, and the FILL18 sequence region. In one embodiment, the filler sequence region is the FILL1 sequence region, the FILL7 sequence region, and the FILL8 sequence region. In one embodiment, the filler sequence region is the FILL1 sequence region, the FILL7 sequence region, and the FILL9 sequence region. In one embodiment, the filler sequence region is the FILL1 sequence region, the FILL7 sequence region, and the FILL10 sequence region. In one embodiment, the filler sequence region is the FILL1 sequence region, the FILL7 sequence region, and the FILL11 sequence region. In one embodiment, the filler sequence region is the FILL1 sequence region, the FILL7 sequence region, and the FILL12 sequence region. In one embodiment, the filler sequence region is the FILL1 sequence region, the FILL7 sequence region, and the FILL13 sequence region. In one embodiment, the filler sequence region is the FILL1 sequence region, the FILL7 sequence region, and the FILL14 sequence region. In one embodiment, the filler sequence region is the FILL1 sequence region, the FILL7 sequence region, and the FILL15 sequence region. In one embodiment, the filler sequence region is the FILL1 sequence region, the FILL7 sequence region, and the FILL16 sequence region. In one embodiment, the filler sequence region is the FILL1 sequence region, the FILL7 sequence region, and the FILL17 sequence region. In one embodiment, the filler sequence region is the FILL1 sequence region, the FILL7 sequence region, and the FILL18 sequence region. In one embodiment, the filler sequence region is the FILL1 sequence region, the FILL8 sequence region, and the FILL9 sequence region. In one embodiment, the filler sequence region is the FILL1 sequence region, the FILL8 sequence region, and the FILL10 sequence region. In one embodiment, the filler sequence region is the FILL1 sequence region, the FILL8 sequence region, and the FILL11 sequence region. In one embodiment, the filler sequence region is the FILL1 sequence region, the FILL8 sequence region, and the FILL12 sequence region. In one embodiment, the filler sequence region is the FILL1 sequence region, the FILL8 sequence region, and the FILL13 sequence region. In one embodiment, the filler sequence region is the FILL1 sequence region, the FILL8 sequence region, and the FILL14 sequence region. In one embodiment, the filler sequence region is the FILL1 sequence region, the FILL8 sequence region, and the FILL15 sequence region. In one embodiment, the filler sequence region is the FILL1 sequence region, the FILL8 sequence region, and the FILL16 sequence region. In one embodiment, the filler sequence region is the FILL1 sequence region, the FILL8 sequence region, and the FILL17 sequence region. In one embodiment, the filler sequence region is the FILL1 sequence region, the FILL8 sequence region, and the FILL18 sequence region. In one embodiment, the filler sequence region is the FILL1 sequence region, the FILL9 sequence region, and the FILL10 sequence region. In one embodiment, the filler sequence region is the FILL1 sequence region, the FILL9 sequence region, and the FILL11 sequence region. In one embodiment, the filler sequence region is the FILL1 sequence region, the FILL9 sequence region, and the FILL12 sequence region. In one embodiment, the filler sequence region is the FILL1 sequence region, the FILL9 sequence region, and the FILL13 sequence region. In one embodiment, the filler sequence region is the FILL1 sequence region, the FILL9 sequence region, and the FILL14 sequence region. In one embodiment, the filler sequence region is the FILL1 sequence region, the FILL9 sequence region, and the FILL15 sequence region. In one embodiment, the filler sequence region is the FILL1 sequence region, the FILL9 sequence region, and the FILL16 sequence region. In one embodiment, the filler sequence region is the FILL1 sequence region, the FILL9 sequence region, and the FILL17 sequence region. In one embodiment, the filler sequence region is the FILL1 sequence region, the FILL9 sequence region, and the FILL18 sequence region. In one embodiment, the filler sequence region is the FILL1 sequence region, the FILL10 sequence region, and the FILL11 sequence region. In one embodiment, the filler sequence region is the FILL1 sequence region, the FILL10 sequence region, and the FILL12 sequence region. In one embodiment, the filler sequence region is the FILL1 sequence region, the FILL10 sequence region, and the FILL13 sequence region. In one embodiment, the filler sequence region is the FILL1 sequence region, the FILL10 sequence region, and the FILL14 sequence region. In one embodiment, the filler sequence region is the FILL1 sequence region, the FILL10 sequence region, and the FILL15 sequence region. In one embodiment, the filler sequence region is the FILL1 sequence region, the FILL10 sequence region, and the FILL16 sequence region. In one embodiment, the filler sequence region is the FILL1 sequence region, the FILL10 sequence region, and the FILL17 sequence region. In one embodiment, the filler sequence region is the FILL1 sequence region, the FILL10 sequence region, and the FILL18 sequence region. In one embodiment, the filler sequence region is the FILL1 sequence region, the FILL11 sequence region, and the FILL12 sequence region. In one embodiment, the filler sequence region is the FILL1 sequence region, the FILL1 sequence region, and the FILL13 sequence region. In one embodiment, the filler sequence region is the FILL1 sequence region, the FILL11 sequence region, and the FILL14 sequence region. In one embodiment, the filler sequence region is the FILL1 sequence region, the FILL11 sequence region, and the FILL15 sequence region. In one embodiment, the filler sequence region is the FILL1 sequence region, the FILL11 sequence region, and the FILL16 sequence region. In one embodiment, the filler sequence region is the FILL1 sequence region, the FILL11 sequence region, and the FILL17 sequence region. In one embodiment, the filler sequence region is the FILL1 sequence region, the FILL11 sequence region, and the FILL18 sequence region. In one embodiment, the filler sequence region is the FILL1 sequence region, the FILL12 sequence region, and the FILL13 sequence region. In one embodiment, the filler sequence region is the FILL1 sequence region, the FILL12 sequence region, and the FILL14 sequence region. In one embodiment, the filler sequence region is the FILL1 sequence region, the FILL12 sequence region, and the FILL15 sequence region. In one embodiment, the filler sequence region is the FILL1 sequence region, the FILL12 sequence region, and the FILL16 sequence region. In one embodiment, the filler sequence region is the FILL1 sequence region, the FILL12 sequence region, and the FILL17 sequence region. In one embodiment, the filler sequence region is the FILL1 sequence region, the FILL12 sequence region, and the FILL18 sequence region. In one embodiment, the filler sequence region is the FILL1 sequence region, the FILL13 sequence region, and the FILL14 sequence region. In one embodiment, the filler sequence region is the FILL1 sequence region, the FILL13 sequence region, and the FILL15 sequence region. In one embodiment, the filler sequence region is the FILL1 sequence region, the FILL13 sequence region, and the FILL16 sequence region. In one embodiment, the filler sequence region is the FILL1 sequence region, the FILL13 sequence region, and the FILL17 sequence region. In one embodiment, the filler sequence region is the FILL1 sequence region, the FILL13 sequence region, and the FILL18 sequence region. In one embodiment, the filler sequence region is the FILL1 sequence region, the FILL14 sequence region, and the FILL15 sequence region. In one embodiment, the filler sequence region is the FILL1 sequence region, the FILL14 sequence region, and the FILL16 sequence region. In one embodiment, the filler sequence region is the FILL1 sequence region, the FILL14 sequence region, and the FILL17 sequence region. In one embodiment, the filler sequence region is the FILL1 sequence region, the FILL14 sequence region, and the FILL18 sequence region. In one embodiment, the filler sequence region is the FILL1 sequence region, the FILL15 sequence region, and the FILL16 sequence region. In one embodiment, the filler sequence region is the FILL1 sequence region, the FILL15 sequence region, and the FILL17 sequence region. In one embodiment, the filler sequence region is the FILL1 sequence region, the FILL15 sequence region, and the FILL18 sequence region. In one embodiment, the filler sequence region is the FILL1 sequence region, the FILL16 sequence region, and the FILL17 sequence region. In one embodiment, the filler sequence region is the FILL1 sequence region, the FILL16 sequence region, and the FILL18 sequence region. In one embodiment, the filler sequence region is the FILL1 sequence region, the FILL17 sequence region, and the FILL18 sequence region. In one embodiment, the filler sequence region is the FILL2 sequence region, the FILL3 sequence region, and the FILL4 sequence region. In one embodiment, the filler sequence region is the FILL2 sequence region, the FILL3 sequence region, and the FILL5 sequence region. In one embodiment, the filler sequence region is the FILL2 sequence region, the FILL3 sequence region, and the FILL6 sequence region. In one embodiment, the filler sequence region is the FILL2 sequence region, the FILL3 sequence region, and the FILL7 sequence region. In one embodiment, the filler sequence region is the FILL2 sequence region, the FILL3 sequence region, and the FILL8 sequence region. In one embodiment, the filler sequence region is the FILL2 sequence region, the FILL3 sequence region, and the FILL9 sequence region. In one embodiment, the filler sequence region is the FILL2 sequence region, the FILL3 sequence region, and the FILL10 sequence region. In one embodiment, the filler sequence region is the FILL2 sequence region, the FILL3 sequence region, and the FILL11 sequence region. In one embodiment, the filler sequence region is the FILL2 sequence region, the FILL3 sequence region, and the FILL12 sequence region. In one embodiment, the filler sequence region is the FILL2 sequence region, the FILL3 sequence region, and the FILL13 sequence region. In one embodiment, the filler sequence region is the FILL2 sequence region, the FILL3 sequence region, and the FILL14 sequence region. In one embodiment, the filler sequence region is the FILL2 sequence region, the FILL3 sequence region, and the FILL15 sequence region. In one embodiment, the filler sequence region is the FILL2 sequence region, the FILL3 sequence region, and the FILL16 sequence region. In one embodiment, the filler sequence region is the FILL2 sequence region, the FILL3 sequence region, and the FILL17 sequence region. In one embodiment, the filler sequence region is the FILL2 sequence region, the FILL3 sequence region, and the FILL18 sequence region. In one embodiment, the filler sequence region is the FILL2 sequence region, the FILL4 sequence region, and the FILL5 sequence region. In one embodiment, the filler sequence region is the FILL2 sequence region, the FILL4 sequence region, and the FILL6 sequence region. In one embodiment, the filler sequence region is the FILL2 sequence region, the FILL4 sequence region, and the FILL7 sequence region. In one embodiment, the filler sequence region is the FILL2 sequence region, the FILL4 sequence region, and the FILL8 sequence region. In one embodiment, the filler sequence region is the FILL2 sequence region, the FILL4 sequence region, and the FILL9 sequence region. In one embodiment, the filler sequence region is the FILL2 sequence region, the FILL4 sequence region, and the FILL10 sequence region. In one embodiment, the filler sequence region is the FILL2 sequence region, the FILL4 sequence region, and the FILL11 sequence region. In one embodiment, the filler sequence region is the FILL2 sequence region, the FILL4 sequence region, and the FILL12 sequence region. In one embodiment, the filler sequence region is the FILL2 sequence region, the FILL4 sequence region, and the FILL13 sequence region. In one embodiment, the filler sequence region is the FILL2 sequence region, the FILL4 sequence region, and the FILL14 sequence region. In one embodiment, the filler sequence region is the FILL2 sequence region, the FILL4 sequence region, and the FILL15 sequence region. In one embodiment, the filler sequence region is the FILL2 sequence region, the FILL4 sequence region, and the FILL16 sequence region. In one embodiment, the filler sequence region is the FILL2 sequence region, the FILL4 sequence region, and the FILL17 sequence region. In one embodiment, the filler sequence region is the FILL2 sequence region, the FILL4 sequence region, and the FILL18 sequence region. In one embodiment, the filler sequence region is the FILL2 sequence region, the FILL5 sequence region, and the FILL6 sequence region. In one embodiment, the filler sequence region is the FILL2 sequence region, the FILL5 sequence region, and the FILL7 sequence region. In one embodiment, the filler sequence region is the FILL2 sequence region, the FILL5 sequence region, and the FILL8 sequence region. In one embodiment, the filler sequence region is the FILL2 sequence region, the FILL5 sequence region, and the FILL9 sequence region. In one embodiment, the filler sequence region is the FILL2 sequence region, the FILL5 sequence region, and the FILL10 sequence region. In one embodiment, the filler sequence region is the FILL2 sequence region, the FILL5 sequence region, and the FILL11 sequence region. In one embodiment, the filler sequence region is the FILL2 sequence region, the FILL5 sequence region, and the FILL12 sequence region. In one embodiment, the filler sequence region is the FILL2 sequence region, the FILL5 sequence region, and the FILL13 sequence region. In one embodiment, the filler sequence region is the FILL2 sequence region, the FILL5 sequence region, and the FILL14 sequence region. In one embodiment, the filler sequence region is the FILL2 sequence region, the FILL5 sequence region, and the FILL15 sequence region. In one embodiment, the filler sequence region is the FILL2 sequence region, the FILL5 sequence region, and the FILL16 sequence region. In one embodiment, the filler sequence region is the FILL2 sequence region, the FILL5 sequence region, and the FILL17 sequence region. In one embodiment, the filler sequence region is the FILL2 sequence region, the FILL5 sequence region, and the FILL18 sequence region. In one embodiment, the filler sequence region is the FILL2 sequence region, the FILL6 sequence region, and the FILL7 sequence region. In one embodiment, the filler sequence region is the FILL2 sequence region, the FILL6 sequence region, and the FILL8 sequence region. In one embodiment, the filler sequence region is the FILL2 sequence region, the FILL6 sequence region, and the FILL9 sequence region. In one embodiment, the filler sequence region is the FILL2 sequence region, the FILL6 sequence region, and the FILL10 sequence region. In one embodiment, the filler sequence region is the FILL2 sequence region, the FILL6 sequence region, and the FILL11 sequence region. In one embodiment, the filler sequence region is the FILL2 sequence region, the FILL6 sequence region, and the FILL12 sequence region. In one embodiment, the filler sequence region is the FILL2 sequence region, the FILL6 sequence region, and the FILL13 sequence region. In one embodiment, the filler sequence region is the FILL2 sequence region, the FILL6 sequence region, and the FILL14 sequence region. In one embodiment, the filler sequence region is the FILL2 sequence region, the FILL6 sequence region, and the FILL15 sequence region. In one embodiment, the filler sequence region is the FILL2 sequence region, the FILL6 sequence region, and the FILL16 sequence region. In one embodiment, the filler sequence region is the FILL2 sequence region, the FILL6 sequence region, and the FILL17 sequence region. In one embodiment, the filler sequence region is the FILL2 sequence region, the FILL6 sequence region, and the FILL18 sequence region. In one embodiment, the filler sequence region is the FILL2 sequence region, the FILL7 sequence region, and the FILL8 sequence region. In one embodiment, the filler sequence region is the FILL2 sequence region, the FILL7 sequence region, and the FILL9 sequence region. In one embodiment, the filler sequence region is the FILL2 sequence region, the FILL7 sequence region, and the FILL10 sequence region. In one embodiment, the filler sequence region is the FILL2 sequence region, the FILL7 sequence region, and the FILL11 sequence region. In one embodiment, the filler sequence region is the FILL2 sequence region, the FILL7 sequence region, and the FILL12 sequence region. In one embodiment, the filler sequence region is the FILL2 sequence region, the FILL7 sequence region, and the FILL13 sequence region. In one embodiment, the filler sequence region is the FILL2 sequence region, the FILL7 sequence region, and the FILL14 sequence region. In one embodiment, the filler sequence region is the FILL2 sequence region, the FILL7 sequence region, and the FILL15 sequence region. In one embodiment, the filler sequence region is the FILL2 sequence region, the FILL7 sequence region, and the FILL16 sequence region. In one embodiment, the filler sequence region is the FILL2 sequence region, the FILL7 sequence region, and the FILL17 sequence region. In one embodiment, the filler sequence region is the FILL2 sequence region, the FILL7 sequence region, and the FILL18 sequence region. In one embodiment, the filler sequence region is the FILL2 sequence region, the FILL5 sequence region, and the FILL9 sequence region. In one embodiment, the filler sequence region is the FILL2 sequence region, the FILL8 sequence region, and the FILL10 sequence region. In one embodiment, the filler sequence region is the FILL2 sequence region, the FILL8 sequence region, and the FILL11 sequence region. In one embodiment, the filler sequence region is the FILL2 sequence region, the FILL5 sequence region, and the FILL12 sequence region. In one embodiment, the filler sequence region is the FILL2 sequence region, the FILL5 sequence region, and the FILL13 sequence region. In one embodiment, the filler sequence region is the FILL2 sequence region, the FILL8 sequence region, and the FILL14 sequence region. In one embodiment, the filler sequence region is the FILL2 sequence region, the FILL8 sequence region, and the FILL15 sequence region. In one embodiment, the filler sequence region is the FILL2 sequence region, the FILL5 sequence region, and the FILL16 sequence region. In one embodiment, the filler sequence region is the FILL2 sequence region, the FILL8 sequence region, and the FILL17 sequence region. In one embodiment, the filler sequence region is the FILL2 sequence region, the FILL8 sequence region, and the FILL18 sequence region. In one embodiment, the filler sequence region is the FILL2 sequence region, the FILL9 sequence region, and the FILL10 sequence region. In one embodiment, the filler sequence region is the FILL2 sequence region, the FILL9 sequence region, and the FILL11 sequence region. In one embodiment, the filler sequence region is the FILL2 sequence region, the FILL9 sequence region, and the FILL12 sequence region. In one embodiment, the filler sequence region is the FILL2 sequence region, the FILL9 sequence region, and the FILL13 sequence region. In one embodiment, the filler sequence region is the FILL2 sequence region, the FILL9 sequence region, and the FILL14 sequence region. In one embodiment, the filler sequence region is the FILL2 sequence region, the FILL9 sequence region, and the FILL15 sequence region. In one embodiment, the filler sequence region is the FILL2 sequence region, the FILL9 sequence region, and the FILL16 sequence region. In one embodiment, the filler sequence region is the FILL2 sequence region, the FILL9 sequence region, and the FILL17 sequence region. In one embodiment, the filler sequence region is the FILL2 sequence region, the FILL9 sequence region, and the FILL18 sequence region. In one embodiment, the filler sequence region is the FILL2 sequence region, the FILL10 sequence region, and the FILL11 sequence region. In one embodiment, the filler sequence region is the FILL2 sequence region, the FILL10 sequence region, and the FILL12 sequence region. In one embodiment, the filler sequence region is the FILL2 sequence region, the FILL10 sequence region, and the FILL13 sequence region. In one embodiment, the filler sequence region is the FILL2 sequence region, the FILL10 sequence region, and the FILL14 sequence region. In one embodiment, the filler sequence region is the FILL2 sequence region, the FILL10 sequence region, and the FILL15 sequence region. In one embodiment, the filler sequence region is the FILL2 sequence region, the FILL10 sequence region, and the FILL16 sequence region. In one embodiment, the filler sequence region is the FILL2 sequence region, the FILL10 sequence region, and the FILL17 sequence region. In one embodiment, the filler sequence region is the FILL2 sequence region, the FILL10 sequence region, and the FILL18 sequence region. In one embodiment, the filler sequence region is the FILL2 sequence region, the FILL11 sequence region, and the FILL12 sequence region. In one embodiment, the filler sequence region is the FILL2 sequence region, the FILL11 sequence region, and the FILL13 sequence region. In one embodiment, the filler sequence region is the FILL2 sequence region, the FILL11 sequence region, and the FILL14 sequence region. In one embodiment, the filler sequence region is the FILL2 sequence region, the FILL11 sequence region, and the FILL15 sequence region. In one embodiment, the filler sequence region is the FILL2 sequence region, the FILL11 sequence region, and the FILL16 sequence region. In one embodiment, the filler sequence region is the FILL2 sequence region, the FILL11 sequence region, and the FILL17 sequence region. In one embodiment, the filler sequence region is the FILL2 sequence region, the FILL11 sequence region, and the FILL18 sequence region. In one embodiment, the filler sequence region is the FILL2 sequence region, the FILL12 sequence region, and the FILL13 sequence region. In one embodiment, the filler sequence region is the FILL2 sequence region, the FILL12 sequence region, and the FILL14 sequence region. In one embodiment, the filler sequence region is the FILL2 sequence region, the FILL12 sequence region, and the FILL15 sequence region. In one embodiment, the filler sequence region is the FILL2 sequence region, the FILL12 sequence region, and the FILL16 sequence region. In one embodiment, the filler sequence region is the FILL2 sequence region, the FILL12 sequence region, and the FILL17 sequence region. In one embodiment, the filler sequence region is the FILL2 sequence region, the FILL12 sequence region, and the FILL18 sequence region. In one embodiment, the filler sequence region is the FILL2 sequence region, the FILL13 sequence region, and the FILL14 sequence region. In one embodiment, the filler sequence region is the FILL2 sequence region, the FILL13 sequence region, and the FILL15 sequence region. In one embodiment, the filler sequence region is the FILL2 sequence region, the FILL13 sequence region, and the FILL16 sequence region. In one embodiment, the filler sequence region is the FILL2 sequence region, the FILL13 sequence region, and the FILL17 sequence region. In one embodiment, the filler sequence region is the FILL2 sequence region, the FILL13 sequence region, and the FILL18 sequence region. In one embodiment, the filler sequence region is the FILL2 sequence region, the FILL14 sequence region, and the FILL15 sequence region. In one embodiment, the filler sequence region is the FILL2 sequence region, the FILL14 sequence region, and the FILL16 sequence region. In one embodiment, the filler sequence region is the FILL2 sequence region, the FILL14 sequence region, and the FILL17 sequence region. In one embodiment, the filler sequence region is the FILL2 sequence region, the FILL14 sequence region, and the FILL18 sequence region. In one embodiment, the filler sequence region is the FILL2 sequence region, the FILL15 sequence region, and the FILL16 sequence region. In one embodiment, the filler sequence region is the FILL2 sequence region, the FILL15 sequence region, and the FILL17 sequence region. In one embodiment, the filler sequence region is the FILL2 sequence region, the FILL15 sequence region, and the FILL18 sequence region. In one embodiment, the filler sequence region is the FILL2 sequence region, the FILL16 sequence region, and the FILL17 sequence region. In one embodiment, the filler sequence region is the FILL2 sequence region, the FILL16 sequence region, and the FILL18 sequence region. In one embodiment, the filler sequence region is the FILL2 sequence region, the FILL17 sequence region, and the FILL18 sequence region. In one embodiment, the filler sequence region is the FILL3 sequence region, the FILL4 sequence region, and the FILL5 sequence region. In one embodiment, the filler sequence region is the FILL3 sequence region, the FILL4 sequence region, and the FILL6 sequence region. In one embodiment, the filler sequence region is the FILL3 sequence region, the FILL4 sequence region, and the FILL7 sequence region. In one embodiment, the filler sequence region is the FILL3 sequence region, the FILL4 sequence region, and the FILL8 sequence region. In one embodiment, the filler sequence region is the FILL3 sequence region, the FILL4 sequence region, and the FILL9 sequence region. In one embodiment, the filler sequence region is the FILL3 sequence region, the FILL4 sequence region, and the FILL10 sequence region. In one embodiment, the filler sequence region is the FILL3 sequence region, the FILL4 sequence region, and the FILL11 sequence region. In one embodiment, the filler sequence region is the FILL3 sequence region, the FILL4 sequence region, and the FILL12 sequence region. In one embodiment, the filler sequence region is the FILL3 sequence region, the FILL4 sequence region, and the FILL13 sequence region. In one embodiment, the filler sequence region is the FILL3 sequence region, the FILL4 sequence region, and the FILL14 sequence region. In one embodiment, the filler sequence region is the FILL3 sequence region, the FILL4 sequence region, and the FILL15 sequence region. In one embodiment, the filler sequence region is the FILL3 sequence region, the FILL4 sequence region, and the FILL16 sequence region. In one embodiment, the filler sequence region is the FILL3 sequence region, the FILL4 sequence region, and the FILL17 sequence region. In one embodiment, the filler sequence region is the FILL3 sequence region, the FILL4 sequence region, and the FILL18 sequence region. In one embodiment, the filler sequence region is the FILL3 sequence region, the FILL5 sequence region, and the FILL6 sequence region. In one embodiment, the filler sequence region is the FILL3 sequence region, the FILL5 sequence region, and the FILL7 sequence region. In one embodiment, the filler sequence region is the FILL3 sequence region, the FILL5 sequence region, and the FILL8 sequence region. In one embodiment, the filler sequence region is the FILL3 sequence region, the FILL5 sequence region, and the FILL9 sequence region. In one embodiment, the filler sequence region is the FILL3 sequence region, the FILL5 sequence region, and the FILL10 sequence region. In one embodiment, the filler sequence region is the FILL3 sequence region, the FILL5 sequence region, and the FILL11 sequence region. In one embodiment, the filler sequence region is the FILL3 sequence region, the FILL5 sequence region, and the FILL12 sequence region. In one embodiment, the filler sequence region is the FILL3 sequence region, the FILL5 sequence region, and the FILL13 sequence region. In one embodiment, the filler sequence region is the FILL3 sequence region, the FILL5 sequence region, and the FILL14 sequence region. In one embodiment, the filler sequence region is the FILL3 sequence region, the FILL5 sequence region, and the FILL15 sequence region. In one embodiment, the filler sequence region is the FILL3 sequence region, the FILL5 sequence region, and the FILL16 sequence region. In one embodiment, the filler sequence region is the FILL3 sequence region, the FILL5 sequence region, and the FILL17 sequence region. In one embodiment, the filler sequence region is the FILL3 sequence region, the FILL5 sequence region, and the FILL18 sequence region. In one embodiment, the filler sequence region is the FILL3 sequence region, the FILL6 sequence region, and the FILL7 sequence region. In one embodiment, the filler sequence region is the FILL3 sequence region, the FILL6 sequence region, and the FILL5 sequence region. In one embodiment, the filler sequence region is the FILL3 sequence region, the FILL6 sequence region, and the FILL9 sequence region. In one embodiment, the filler sequence region is the FILL3 sequence region, the FILL6 sequence region, and the FILL10 sequence region. In one embodiment, the filler sequence region is the FILL3 sequence region, the FILL6 sequence region, and the FILL11 sequence region. In one embodiment, the filler sequence region is the FILL3 sequence region, the FILL6 sequence region, and the FILL12 sequence region. In one embodiment, the filler sequence region is the FILL3 sequence region, the FILL6 sequence region, and the FILL13 sequence region. In one embodiment, the filler sequence region is the FILL3 sequence region, the FILL6 sequence region, and the FILL14 sequence region. In one embodiment, the filler sequence region is the FILL3 sequence region, the FILL6 sequence region, and the FILL15 sequence region. In one embodiment, the filler sequence region is the FILL3 sequence region, the FILL6 sequence region, and the FILL16 sequence region. In one embodiment, the filler sequence region is the FILL3 sequence region, the FILL6 sequence region, and the FILL17 sequence region. In one embodiment, the filler sequence region is the FILL3 sequence region, the FILL6 sequence region, and the FILL18 sequence region. In one embodiment, the filler sequence region is the FILL3 sequence region, the FILL7 sequence region, and the FILL8 sequence region. In one embodiment, the filler sequence region is the FILL3 sequence region, the FILL7 sequence region, and the FILL9 sequence region. In one embodiment, the filler sequence region is the FILL3 sequence region, the FILL7 sequence region, and the FILL10 sequence region. In one embodiment, the filler sequence region is the FILL3 sequence region, the FILL7 sequence region, and the FILL11 sequence region. In one embodiment, the filler sequence region is the FILL3 sequence region, the FILL7 sequence region, and the FILL12 sequence region. In one embodiment, the filler sequence region is the FILL3 sequence region, the FILL7 sequence region, and the FILL13 sequence region. In one embodiment, the filler sequence region is the FILL3 sequence region, the FILL7 sequence region, and the FILL14 sequence region. In one embodiment, the filler sequence region is the FILL3 sequence region, the FILL7 sequence region, and the FILL15 sequence region. In one embodiment, the filler sequence region is the FILL3 sequence region, the FILL7 sequence region, and the FILL16 sequence region. In one embodiment, the filler sequence region is the FILL3 sequence region, the FILL7 sequence region, and the FILL17 sequence region. In one embodiment, the filler sequence region is the FILL3 sequence region, the FILL7 sequence region, and the FILL18 sequence region. In one embodiment, the filler sequence region is the FILL3 sequence region, the FILL8 sequence region, and the FILL9 sequence region. In one embodiment, the filler sequence region is the FILL3 sequence region, the FILL8 sequence region, and the FILL10 sequence region. In one embodiment, the filler sequence region is the FILL3 sequence region, the FILL8 sequence region, and the FILL11 sequence region. In one embodiment, the filler sequence region is the FILL3 sequence region, the FILL8 sequence region, and the FILL12 sequence region. In one embodiment, the filler sequence region is the FILL3 sequence region, the FILL8 sequence region, and the FILL13 sequence region. In one embodiment, the filler sequence region is the FILL3 sequence region, the FILL8 sequence region, and the FILL14 sequence region. In one embodiment, the filler sequence region is the FILL3 sequence region, the FILL8 sequence region, and the FILL15 sequence region. In one embodiment, the filler sequence region is the FILL3 sequence region, the FILL8 sequence region, and the FILL16 sequence region. In one embodiment, the filler sequence region is the FILL3 sequence region, the FILL8 sequence region, and the FILL17 sequence region. In one embodiment, the filler sequence region is the FILL3 sequence region, the FILL8 sequence region, and the FILL18 sequence region. In one embodiment, the filler sequence region is the FILL3 sequence region, the FILL9 sequence region, and the FILL10 sequence region. In one embodiment, the filler sequence region is the FILL3 sequence region, the FILL9 sequence region, and the FILL11 sequence region. In one embodiment, the filler sequence region is the FILL3 sequence region, the FILL9 sequence region, and the FILL12 sequence region. In one embodiment, the filler sequence region is the FILL3 sequence region, the FILL9 sequence region, and the FILL13 sequence region. In one embodiment, the filler sequence region is the FILL3 sequence region, the FILL9 sequence region, and the FILL14 sequence region. In one embodiment, the filler sequence region is the FILL3 sequence region, the FILL9 sequence region, and the FILL15 sequence region. In one embodiment, the filler sequence region is the FILL3 sequence region, the FILL9 sequence region, and the FILL16 sequence region. In one embodiment, the filler sequence region is the FILL3 sequence region, the FILL9 sequence region, and the FILL17 sequence region. In one embodiment, the filler sequence region is the FILL3 sequence region, the FILL9 sequence region, and the FILL18 sequence region. In one embodiment, the filler sequence region is the FILL3 sequence region, the FILL10 sequence region, and the FILL11 sequence region. In one embodiment, the filler sequence region is the FILL3 sequence region, the FILL10 sequence region, and the FILL12 sequence region. In one embodiment, the filler sequence region is the FILL3 sequence region, the FILL10 sequence region, and the FILL13 sequence region. In one embodiment, the filler sequence region is the FILL3 sequence region, the FILL10 sequence region, and the FILL14 sequence region. In one embodiment, the filler sequence region is the FILL3 sequence region, the FILL10 sequence region, and the FILL15 sequence region. In one embodiment, the filler sequence region is the FILL3 sequence region, the FILL10 sequence region, and the FILL16 sequence region. In one embodiment, the filler sequence region is the FILL3 sequence region, the FILL10 sequence region, and the FILL17 sequence region. In one embodiment, the filler sequence region is the FILL3 sequence region, the FILL10 sequence region, and the FILL18 sequence region. In one embodiment, the filler sequence region is the FILL3 sequence region, the FILL11 sequence region, and the FILL12 sequence region. In one embodiment, the filler sequence region is the FILL3 sequence region, the FILL11 sequence region, and the FILL13 sequence region. In one embodiment, the filler sequence region is the FILL3 sequence region, the FILL11 sequence region, and the FILL14 sequence region. In one embodiment, the filler sequence region is the FILL3 sequence region, the FILL11 sequence region, and the FILL15 sequence region. In one embodiment, the filler sequence region is the FILL3 sequence region, the FILL11 sequence region, and the FILL16 sequence region. In one embodiment, the filler sequence region is the FILL3 sequence region, the FILL11 sequence region, and the FILL17 sequence region. In one embodiment, the filler sequence region is the FILL3 sequence region, the FILL11 sequence region, and the FILL18 sequence region. In one embodiment, the filler sequence region is the FILL3 sequence region, the FILL12 sequence region, and the FILL13 sequence region. In one embodiment, the filler sequence region is the FILL3 sequence region, the FILL12 sequence region, and the FILL14 sequence region. In one embodiment, the filler sequence region is the FILL3 sequence region, the FILL12 sequence region, and the FILL15 sequence region. In one embodiment, the filler sequence region is the FILL3 sequence region, the FILL12 sequence region, and the FILL16 sequence region. In one embodiment, the filler sequence region is the FILL3 sequence region, the FILL12 sequence region, and the FILL17 sequence region. In one embodiment, the filler sequence region is the FILL3 sequence region, the FILL12 sequence region, and the FILL18 sequence region. In one embodiment, the filler sequence region is the FILL3 sequence region, the FILL13 sequence region, and the FILL14 sequence region. In one embodiment, the filler sequence region is the FILL3 sequence region, the FILL13 sequence region, and the FILL15 sequence region. In one embodiment, the filler sequence region is the FILL3 sequence region, the FILL13 sequence region, and the FILL16 sequence region. In one embodiment, the filler sequence region is the FILL3 sequence region, the FILL13 sequence region, and the FILL17 sequence region. In one embodiment, the filler sequence region is the FILL3 sequence region, the FILL13 sequence region, and the FILL18 sequence region. In one embodiment, the filler sequence region is the FILL3 sequence region, the FILL14 sequence region, and the FILL15 sequence region. In one embodiment, the filler sequence region is the FILL3 sequence region, the FILL14 sequence region, and the FILL16 sequence region. In one embodiment, the filler sequence region is the FILL3 sequence region, the FILL14 sequence region, and the FILL17 sequence region. In one embodiment, the filler sequence region is the FILL3 sequence region, the FILL14 sequence region, and the FILL18 sequence region. In one embodiment, the filler sequence region is the FILL3 sequence region, the FILL15 sequence region, and the FILL16 sequence region. In one embodiment, the filler sequence region is the FILL3 sequence region, the FILL15 sequence region, and the FILL17 sequence region. In one embodiment, the filler sequence region is the FILL3 sequence region, the FILL15 sequence region, and the FILL18 sequence region. In one embodiment, the filler sequence region is the FILL3 sequence region, the FILL16 sequence region, and the FILL17 sequence region. In one embodiment, the filler sequence region is the FILL3 sequence region, the FILL16 sequence region, and the FILL18 sequence region. In one embodiment, the filler sequence region is the FILL3 sequence region, the FILL17 sequence region, and the FILL18 sequence region. In one embodiment, the filler sequence region is the FILL4 sequence region, the FILL5 sequence region, and the FILL6 sequence region. In one embodiment, the filler sequence region is the FILL4 sequence region, the FILL5 sequence region, and the FILL7 sequence region. In one embodiment, the filler sequence region is the FILL4 sequence region, the FILL5 sequence region, and the FILL8 sequence region. In one embodiment, the filler sequence region is the FILL4 sequence region, the FILL5 sequence region, and the FILL9 sequence region. In one embodiment, the filler sequence region is the FILL4 sequence region, the FILL5 sequence region, and the FILL10 sequence region. In one embodiment, the filler sequence region is the FILL4 sequence region, the FILL5 sequence region, and the FILL11 sequence region. In one embodiment, the filler sequence region is the FILL4 sequence region, the FILL5 sequence region, and the FILL12 sequence region. In one embodiment, the filler sequence region is the FILL4 sequence region, the FILL5 sequence region, and the FILL13 sequence region. In one embodiment, the filler sequence region is the FILL4 sequence region, the FILL5 sequence region, and the FILL14 sequence region. In one embodiment, the filler sequence region is the FILL4 sequence region, the FILL5 sequence region, and the FILL15 sequence region. In one embodiment, the filler sequence region is the FILL4 sequence region, the FILL5 sequence region, and the FILL16 sequence region. In one embodiment, the filler sequence region is the FILL4 sequence region, the FILL5 sequence region, and the FILL17 sequence region. In one embodiment, the filler sequence region is the FILL4 sequence region, the FILL5 sequence region, and the FILL18 sequence region. In one embodiment, the filler sequence region is the FILL4 sequence region, the FILL6 sequence region, and the FILL7 sequence region. In one embodiment, the filler sequence region is the FILL4 sequence region, the FILL6 sequence region, and the FILL8 sequence region. In one embodiment, the filler sequence region is the FILL4 sequence region, the FILL6 sequence region, and the FILL9 sequence region. In one embodiment, the filler sequence region is the FILL4 sequence region, the FILL6 sequence region, and the FILL10 sequence region. In one embodiment, the filler sequence region is the FILL4 sequence region, the FILL6 sequence region, and the FILL11 sequence region. In one embodiment, the filler sequence region is the FILL4 sequence region, the FILL6 sequence region, and the FILL12 sequence region. In one embodiment, the filler sequence region is the FILL4 sequence region, the FILL6 sequence region, and the FILL13 sequence region. In one embodiment, the filler sequence region is the FILL4 sequence region, the FILL6 sequence region, and the FILL14 sequence region. In one embodiment, the filler sequence region is the FILL4 sequence region, the FILL6 sequence region, and the FILL15 sequence region. In one embodiment, the filler sequence region is the FILL4 sequence region, the FILL6 sequence region, and the FILL16 sequence region. In one embodiment, the filler sequence region is the FILL4 sequence region, the FILL6 sequence region, and the FILL17 sequence region. In one embodiment, the filler sequence region is the FILL4 sequence region, the FILL6 sequence region, and the FILL18 sequence region. In one embodiment, the filler sequence region is the FILL4 sequence region, the FILL7 sequence region, and the FILL8 sequence region. In one embodiment, the filler sequence region is the FILL4 sequence region, the FILL7 sequence region, and the FILL9 sequence region. In one embodiment, the filler sequence region is the FILL4 sequence region, the FILL7 sequence region, and the FILL10 sequence region. In one embodiment, the filler sequence region is the FILL4 sequence region, the FILL7 sequence region, and the FILL11 sequence region. In one embodiment, the filler sequence region is the FILL4 sequence region, the FILL7 sequence region, and the FILL12 sequence region. In one embodiment, the filler sequence region is the FILL4 sequence region, the FILL7 sequence region, and the FILL13 sequence region. In one embodiment, the filler sequence region is the FILL4 sequence region, the FILL7 sequence region, and the FILL14 sequence region. In one embodiment, the filler sequence region is the FILL4 sequence region, the FILL7 sequence region, and the FILL15 sequence region. In one embodiment, the filler sequence region is the FILL4 sequence region, the FILL7 sequence region, and the FILL16 sequence region. In one embodiment, the filler sequence region is the FILL4 sequence region, the FILL7 sequence region, and the FILL17 sequence region. In one embodiment, the filler sequence region is the FILL4 sequence region, the FILL7 sequence region, and the FILL18 sequence region. In one embodiment, the filler sequence region is the FILL4 sequence region, the FILL8 sequence region, and the FILL9 sequence region. In one embodiment, the filler sequence region is the FILL4 sequence region, the FILL8 sequence region, and the FILL10 sequence region. In one embodiment, the filler sequence region is the FILL4 sequence region, the FILL8 sequence region, and the FILL11 sequence region. In one embodiment, the filler sequence region is the FILL4 sequence region, the FILL8 sequence region, and the FILL12 sequence region. In one embodiment, the filler sequence region is the FILL4 sequence region, the FILL8 sequence region, and the FILL13 sequence region. In one embodiment, the filler sequence region is the FILL4 sequence region, the FILL8 sequence region, and the FILL14 sequence region. In one embodiment, the filler sequence region is the FILL4 sequence region, the FILL8 sequence region, and the FILL15 sequence region. In one embodiment, the filler sequence region is the FILL4 sequence region, the FILL8 sequence region, and the FILL16 sequence region. In one embodiment, the filler sequence region is the FILL4 sequence region, the FILL8 sequence region, and the FILL17 sequence region. In one embodiment, the filler sequence region is the FILL4 sequence region, the FILL8 sequence region, and the FILL18 sequence region. In one embodiment, the filler sequence region is the FILL4 sequence region, the FILL9 sequence region, and the FILL10 sequence region. In one embodiment, the filler sequence region is the FILL4 sequence region, the FILL9 sequence region, and the FILL11 sequence region. In one embodiment, the filler sequence region is the FILL4 sequence region, the FILL9 sequence region, and the FILL12 sequence region. In one embodiment, the filler sequence region is the FILL4 sequence region, the FILL9 sequence region, and the FILL13 sequence region. In one embodiment, the filler sequence region is the FILL4 sequence region, the FILL9 sequence region, and the FILL14 sequence region. In one embodiment, the filler sequence region is the FILL4 sequence region, the FILL9 sequence region, and the FILL15 sequence region. In one embodiment, the filler sequence region is the FILL4 sequence region, the FILL9 sequence region, and the FILL16 sequence region. In one embodiment, the filler sequence region is the FILL4 sequence region, the FILL9 sequence region, and the FILL17 sequence region. In one embodiment, the filler sequence region is the FILL4 sequence region, the FILL9 sequence region, and the FILL18 sequence region. In one embodiment, the filler sequence region is the FILL4 sequence region, the FILL10 sequence region, and the FILL11 sequence region. In one embodiment, the filler sequence region is the FILL4 sequence region, the FILL10 sequence region, and the FILL12 sequence region. In one embodiment, the filler sequence region is the FILL4 sequence region, the FILL10 sequence region, and the FILL13 sequence region. In one embodiment, the filler sequence region is the FILL4 sequence region, the FILL10 sequence region, and the FILL14 sequence region. In one embodiment, the filler sequence region is the FILL4 sequence region, the FILL10 sequence region, and the FILL15 sequence region. In one embodiment, the filler sequence region is the FILL4 sequence region, the FILL10 sequence region, and the FILL16 sequence region. In one embodiment, the filler sequence region is the FILL4 sequence region, the FILL10 sequence region, and the FILL17 sequence region. In one embodiment, the filler sequence region is the FILL4 sequence region, the FILL10 sequence region, and the FILL18 sequence region. In one embodiment, the filler sequence region is the FILL4 sequence region, the FILL11 sequence region, and the FILL12 sequence region. In one embodiment, the filler sequence region is the FILL4 sequence region, the FILL11 sequence region, and the FILL13 sequence region. In one embodiment, the filler sequence region is the FILL4 sequence region, the FILL11 sequence region, and the FILL14 sequence region. In one embodiment, the filler sequence region is the FILL4 sequence region, the FILL11 sequence region, and the FILL15 sequence region. In one embodiment, the filler sequence region is the FILL4 sequence region, the FILL11 sequence region, and the FILL16 sequence region. In one embodiment, the filler sequence region is the FILL4 sequence region, the FILL11 sequence region, and the FILL17 sequence region. In one embodiment, the filler sequence region is the FILL4 sequence region, the FILL11 sequence region, and the FILL18 sequence region. In one embodiment, the filler sequence region is the FILL4 sequence region, the FILL12 sequence region, and the FILL13 sequence region. In one embodiment, the filler sequence region is the FILL4 sequence region, the FILL12 sequence region, and the FILL14 sequence region. In one embodiment, the filler sequence region is the FILL4 sequence region, the FILL12 sequence region, and the FILL15 sequence region. In one embodiment, the filler sequence region is the FILL4 sequence region, the FILL12 sequence region, and the FILL16 sequence region. In one embodiment, the filler sequence region is the FILL4 sequence region, the FILL12 sequence region, and the FILL17 sequence region. In one embodiment, the filler sequence region is the FILL4 sequence region, the FILL12 sequence region, and the FILL18 sequence region. In one embodiment, the filler sequence region is the FILL4 sequence region, the FILL13 sequence region, and the FILL14 sequence region. In one embodiment, the filler sequence region is the FILL4 sequence region, the FILL13 sequence region, and the FILL15 sequence region. In one embodiment, the filler sequence region is the FILL4 sequence region, the FILL13 sequence region, and the FILL16 sequence region. In one embodiment, the filler sequence region is the FILL4 sequence region, the FILL13 sequence region, and the FILL17 sequence region. In one embodiment, the filler sequence region is the FILL4 sequence region, the FILL13 sequence region, and the FILL18 sequence region. In one embodiment, the filler sequence region is the FILL4 sequence region, the FILL14 sequence region, and the FILL15 sequence region. In one embodiment, the filler sequence region is the FILL4 sequence region, the FILL14 sequence region, and the FILL16 sequence region. In one embodiment, the filler sequence region is the FILL4 sequence region, the FILL14 sequence region, and the FILL17 sequence region. In one embodiment, the filler sequence region is the FILL4 sequence region, the FILL14 sequence region, and the FILL18 sequence region. In one embodiment, the filler sequence region is the FILL4 sequence region, the FILL15 sequence region, and the FILL16 sequence region. In one embodiment, the filler sequence region is the FILL4 sequence region, the FILL15 sequence region, and the FILL17 sequence region. In one embodiment, the filler sequence region is the FILL4 sequence region, the FILL15 sequence region, and the FILL18 sequence region. In one embodiment, the filler sequence region is the FILL4 sequence region, the FILL16 sequence region, and the FILL17 sequence region. In one embodiment, the filler sequence region is the FILL4 sequence region, the FILL16 sequence region, and the FILL18 sequence region. In one embodiment, the filler sequence region is the FILL4 sequence region, the FILL17 sequence region, and the FILL18 sequence region. In one embodiment, the filler sequence region is the FILL5 sequence region, the FILL6 sequence region, and the FILL7 sequence region. In one embodiment, the filler sequence region is the FILL5 sequence region, the FILL6 sequence region, and the FILL8 sequence region. In one embodiment, the filler sequence region is the FILL5 sequence region, the FILL6 sequence region, and the FILL9 sequence region. In one embodiment, the filler sequence region is the FILL5 sequence region, the FILL6 sequence region, and the FILL10 sequence region. In one embodiment, the filler sequence region is the FILL5 sequence region, the FILL6 sequence region, and the FILL11 sequence region. In one embodiment, the filler sequence region is the FILL5 sequence region, the FILL6 sequence region, and the FILL12 sequence region. In one embodiment, the filler sequence region is the FILL5 sequence region, the FILL6 sequence region, and the FILL13 sequence region. In one embodiment, the filler sequence region is the FILL5 sequence region, the FILL6 sequence region, and the FILL14 sequence region. In one embodiment, the filler sequence region is the FILL5 sequence region, the FILL6 sequence region, and the FILL15 sequence region. In one embodiment, the filler sequence region is the FILL5 sequence region, the FILL6 sequence region, and the FILL16 sequence region. In one embodiment, the filler sequence region is the FILL5 sequence region, the FILL6 sequence region, and the FILL17 sequence region. In one embodiment, the filler sequence region is the FILL5 sequence region, the FILL6 sequence region, and the FILL18 sequence region. In one embodiment, the filler sequence region is the FILL5 sequence region, the FILL7 sequence region, and the FILL8 sequence region. In one embodiment, the filler sequence region is the FILL5 sequence region, the FILL7 sequence region, and the FILL9 sequence region. In one embodiment, the filler sequence region is the FILL5 sequence region, the FILL7 sequence region, and the FILL10 sequence region. In one embodiment, the filler sequence region is the FILL5 sequence region, the FILL7 sequence region, and the FILL11 sequence region. In one embodiment, the filler sequence region is the FILL5 sequence region, the FILL7 sequence region, and the FILL12 sequence region. In one embodiment, the filler sequence region is the FILL5 sequence region, the FILL7 sequence region, and the FILL13 sequence region. In one embodiment, the filler sequence region is the FILL5 sequence region, the FILL7 sequence region, and the FILL14 sequence region. In one embodiment, the filler sequence region is the FILL5 sequence region, the FILL7 sequence region, and the FILL15 sequence region. In one embodiment, the filler sequence region is the FILL5 sequence region, the FILL7 sequence region, and the FILL16 sequence region. In one embodiment, the filler sequence region is the FILL5 sequence region, the FILL7 sequence region, and the FILL17 sequence region. In one embodiment, the filler sequence region is the FILL5 sequence region, the FILL7 sequence region, and the FILL18 sequence region. In one embodiment, the filler sequence region is the FILL5 sequence region, the FILL8 sequence region, and the FILL9 sequence region. In one embodiment, the filler sequence region is the FILL5 sequence region, the FILL8 sequence region, and the FILL10 sequence region. In one embodiment, the filler sequence region is the FILL5 sequence region, the FILL8 sequence region, and the FILL11 sequence region. In one embodiment, the filler sequence region is the FILL5 sequence region, the FILL8 sequence region, and the FILL12 sequence region. In one embodiment, the filler sequence region is the FILL5 sequence region, the FILL8 sequence region, and the FILL13 sequence region. In one embodiment, the filler sequence region is the FILL5 sequence region, the FILL8 sequence region, and the FILL14 sequence region. In one embodiment, the filler sequence region is the FILL5 sequence region, the FILL8 sequence region, and the FILL15 sequence region. In one embodiment, the filler sequence region is the FILL5 sequence region, the FILL8 sequence region, and the FILL16 sequence region. In one embodiment, the filler sequence region is the FILL5 sequence region, the FILL8 sequence region, and the FILL17 sequence region. In one embodiment, the filler sequence region is the FILL5 sequence region, the FILL8 sequence region, and the FILL18 sequence region. In one embodiment, the filler sequence region is the FILL5 sequence region, the FILL9 sequence region, and the FILL10 sequence region. In one embodiment, the filler sequence region is the FILL5 sequence region, the FILL9 sequence region, and the FILL11 sequence region. In one embodiment, the filler sequence region is the FILL5 sequence region, the FILL9 sequence region, and the FILL12 sequence region. In one embodiment, the filler sequence region is the FILL5 sequence region, the FILL9 sequence region, and the FILL13 sequence region. In one embodiment, the filler sequence region is the FILL5 sequence region, the FILL9 sequence region, and the FILL14 sequence region. In one embodiment, the filler sequence region is the FILL5 sequence region, the FILL9 sequence region, and the FILL15 sequence region. In one embodiment, the filler sequence region is the FILL5 sequence region, the FILL9 sequence region, and the FILL16 sequence region. In one embodiment, the filler sequence region is the FILL5 sequence region, the FILL9 sequence region, and the FILL17 sequence region. In one embodiment, the filler sequence region is the FILL5 sequence region, the FILL9 sequence region, and the FILL18 sequence region. In one embodiment, the filler sequence region is the FILL5 sequence region, the FILL10 sequence region, and the FILL11 sequence region. In one embodiment, the filler sequence region is the FILL5 sequence region, the FILL10 sequence region, and the FILL12 sequence region. In one embodiment, the filler sequence region is the FILL5 sequence region, the FILL10 sequence region, and the FILL13 sequence region. In one embodiment, the filler sequence region is the FILL5 sequence region, the FILL10 sequence region, and the FILL14 sequence region. In one embodiment, the filler sequence region is the FILL5 sequence region, the FILL10 sequence region, and the FILL15 sequence region. In one embodiment, the filler sequence region is the FILL5 sequence region, the FILL10 sequence region, and the FILL16 sequence region. In one embodiment, the filler sequence region is the FILL5 sequence region, the FILL10 sequence region, and the FILL17 sequence region. In one embodiment, the filler sequence region is the FILL5 sequence region, the FILL10 sequence region, and the FILL18 sequence region. In one embodiment, the filler sequence region is the FILL5 sequence region, the FILL11 sequence region, and the FILL12 sequence region. In one embodiment, the filler sequence region is the FILL5 sequence region, the FILL1 sequence region, and the FILL13 sequence region. In one embodiment, the filler sequence region is the FILL5 sequence region, the FILL11 sequence region, and the FILL14 sequence region. In one embodiment, the filler sequence region is the FILL5 sequence region, the FILL11 sequence region, and the FILL15 sequence region. In one embodiment, the filler sequence region is the FILL5 sequence region, the FILL11 sequence region, and the FILL16 sequence region. In one embodiment, the filler sequence region is the FILL5 sequence region, the FILL11 sequence region, and the FILL17 sequence region. In one embodiment, the filler sequence region is the FILL5 sequence region, the FILL11 sequence region, and the FILL18 sequence region. In one embodiment, the filler sequence region is the FILL5 sequence region, the FILL12 sequence region, and the FILL13 sequence region. In one embodiment, the filler sequence region is the FILL5 sequence region, the FILL12 sequence region, and the FILL14 sequence region. In one embodiment, the filler sequence region is the FILL5 sequence region, the FILL12 sequence region, and the FILL15 sequence region. In one embodiment, the filler sequence region is the FILL5 sequence region, the FILL12 sequence region, and the FILL16 sequence region. In one embodiment, the filler sequence region is the FILL5 sequence region, the FILL12 sequence region, and the FILL17 sequence region. In one embodiment, the filler sequence region is the FILL5 sequence region, the FILL12 sequence region, and the FILL18 sequence region. In one embodiment, the filler sequence region is the FILL5 sequence region, the FILL13 sequence region, and the FILL14 sequence region. In one embodiment, the filler sequence region is the FILL5 sequence region, the FILL13 sequence region, and the FILL15 sequence region. In one embodiment, the filler sequence region is the FILL5 sequence region, the FILL13 sequence region, and the FILL16 sequence region. In one embodiment, the filler sequence region is the FILL5 sequence region, the FILL13 sequence region, and the FILL17 sequence region. In one embodiment, the filler sequence region is the FILL5 sequence region, the FILL13 sequence region, and the FILL18 sequence region. In one embodiment, the filler sequence region is the FILL5 sequence region, the FILL14 sequence region, and the FILL15 sequence region. In one embodiment, the filler sequence region is the FILL5 sequence region, the FILL14 sequence region, and the FILL16 sequence region. In one embodiment, the filler sequence region is the FILL5 sequence region, the FILL14 sequence region, and the FILL17 sequence region. In one embodiment, the filler sequence region is the FILL5 sequence region, the FILL14 sequence region, and the FILL18 sequence region. In one embodiment, the filler sequence region is the FILL5 sequence region, the FILL15 sequence region, and the FILL16 sequence region. In one embodiment, the filler sequence region is the FILL5 sequence region, the FILL15 sequence region, and the FILL17 sequence region. In one embodiment, the filler sequence region is the FILL5 sequence region, the FILL15 sequence region, and the FILL18 sequence region. In one embodiment, the filler sequence region is the FILL5 sequence region, the FILL16 sequence region, and the FILL17 sequence region. In one embodiment, the filler sequence region is the FILL5 sequence region, the FILL16 sequence region, and the FILL18 sequence region. In one embodiment, the filler sequence region is the FILL5 sequence region, the FILL17 sequence region, and the FILL18 sequence region. In one embodiment, the filler sequence region is the FILL6 sequence region, the FILL7 sequence region, and the FILL8 sequence region. In one embodiment, the filler sequence region is the FILL6 sequence region, the FILL7 sequence region, and the FILL9 sequence region. In one embodiment, the filler sequence region is the FILL6 sequence region, the FILL7 sequence region, and the FILL10 sequence region. In one embodiment, the filler sequence region is the FILL6 sequence region, the FILL7 sequence region, and the FILL11 sequence region. In one embodiment, the filler sequence region is the FILL6 sequence region, the FILL7 sequence region, and the FILL12 sequence region. In one embodiment, the filler sequence region is the FILL6 sequence region, the FILL7 sequence region, and the FILL13 sequence region. In one embodiment, the filler sequence region is the FILL6 sequence region, the FILL7 sequence region, and the FILL14 sequence region. In one embodiment, the filler sequence region is the FILL6 sequence region, the FILL7 sequence region, and the FILL15 sequence region. In one embodiment, the filler sequence region is the FILL6 sequence region, the FILL7 sequence region, and the FILL16 sequence region. In one embodiment, the filler sequence region is the FILL6 sequence region, the FILL7 sequence region, and the FILL17 sequence region. In one embodiment, the filler sequence region is the FILL6 sequence region, the FILL7 sequence region, and the FILL18 sequence region. In one embodiment, the filler sequence region is the FILL6 sequence region, the FILL8 sequence region, and the FILL9 sequence region. In one embodiment, the filler sequence region is the FILL6 sequence region, the FILL8 sequence region, and the FILL10 sequence region. In one embodiment, the filler sequence region is the FILL6 sequence region, the FILL8 sequence region, and the FILL11 sequence region. In one embodiment, the filler sequence region is the FILL6 sequence region, the FILL8 sequence region, and the FILL12 sequence region. In one embodiment, the filler sequence region is the FILL6 sequence region, the FILL8 sequence region, and the FILL13 sequence region. In one embodiment, the filler sequence region is the FILL6 sequence region, the FILL8 sequence region, and the FILL14 sequence region. In one embodiment, the filler sequence region is the FILL6 sequence region, the FILL8 sequence region, and the FILL15 sequence region. In one embodiment, the filler sequence region is the FILL6 sequence region, the FILL8 sequence region, and the FILL16 sequence region. In one embodiment, the filler sequence region is the FILL6 sequence region, the FILL8 sequence region, and the FILL17 sequence region. In one embodiment, the filler sequence region is the FILL6 sequence region, the FILL8 sequence region, and the FILL18 sequence region. In one embodiment, the filler sequence region is the FILL6 sequence region, the FILL9 sequence region, and the FILL10 sequence region. In one embodiment, the filler sequence region is the FILL6 sequence region, the FILL9 sequence region, and the FILL11 sequence region. In one embodiment, the filler sequence region is the FILL6 sequence region, the FILL9 sequence region, and the FILL12 sequence region. In one embodiment, the filler sequence region is the FILL6 sequence region, the FILL9 sequence region, and the FILL13 sequence region. In one embodiment, the filler sequence region is the FILL6 sequence region, the FILL9 sequence region, and the FILL14 sequence region. In one embodiment, the filler sequence region is the FILL6 sequence region, the FILL9 sequence region, and the FILL15 sequence region. In one embodiment, the filler sequence region is the FILL6 sequence region, the FILL9 sequence region, and the FILL16 sequence region. In one embodiment, the filler sequence region is the FILL6 sequence region, the FILL9 sequence region, and the FILL17 sequence region. In one embodiment, the filler sequence region is the FILL6 sequence region, the FILL9 sequence region, and the FILL18 sequence region. In one embodiment, the filler sequence region is the FILL6 sequence region, the FILL10 sequence region, and the FILL11 sequence region. In one embodiment, the filler sequence region is the FILL6 sequence region, the FILL10 sequence region, and the FILL12 sequence region. In one embodiment, the filler sequence region is the FILL6 sequence region, the FILL10 sequence region, and the FILL13 sequence region. In one embodiment, the filler sequence region is the FILL6 sequence region, the FILL10 sequence region, and the FILL14 sequence region. In one embodiment, the filler sequence region is the FILL6 sequence region, the FILL10 sequence region, and the FILL15 sequence region. In one embodiment, the filler sequence region is the FILL6 sequence region, the FILL10 sequence region, and the FILL16 sequence region. In one embodiment, the filler sequence region is the FILL6 sequence region, the FILL10 sequence region, and the FILL17 sequence region. In one embodiment, the filler sequence region is the FILL6 sequence region, the FILL10 sequence region, and the FILL18 sequence region. In one embodiment, the filler sequence region is the FILL6 sequence region, the FILL11 sequence region, and the FILL12 sequence region. In one embodiment, the filler sequence region is the FILL6 sequence region, the FILL1 sequence region, and the FILL13 sequence region. In one embodiment, the filler sequence region is the FILL6 sequence region, the FILL11 sequence region, and the FILL14 sequence region. In one embodiment, the filler sequence region is the FILL6 sequence region, the FILL11 sequence region, and the FILL15 sequence region. In one embodiment, the filler sequence region is the FILL6 sequence region, the FILL11 sequence region, and the FILL16 sequence region. In one embodiment, the filler sequence region is the FILL6 sequence region, the FILL11 sequence region, and the FILL17 sequence region. In one embodiment, the filler sequence region is the FILL6 sequence region, the FILL11 sequence region, and the FILL18 sequence region. In one embodiment, the filler sequence region is the FILL6 sequence region, the FILL12 sequence region, and the FILL13 sequence region. In one embodiment, the filler sequence region is the FILL6 sequence region, the FILL12 sequence region, and the FILL14 sequence region. In one embodiment, the filler sequence region is the FILL6 sequence region, the FILL12 sequence region, and the FILL15 sequence region. In one embodiment, the filler sequence region is the FILL6 sequence region, the FILL12 sequence region, and the FILL16 sequence region. In one embodiment, the filler sequence region is the FILL6 sequence region, the FILL12 sequence region, and the FILL17 sequence region. In one embodiment, the filler sequence region is the FILL6 sequence region, the FILL12 sequence region, and the FILL18 sequence region. In one embodiment, the filler sequence region is the FILL6 sequence region, the FILL13 sequence region, and the FILL14 sequence region. In one embodiment, the filler sequence region is the FILL6 sequence region, the FILL13 sequence region, and the FILL15 sequence region. In one embodiment, the filler sequence region is the FILL6 sequence region, the FILL13 sequence region, and the FILL16 sequence region. In one embodiment, the filler sequence region is the FILL6 sequence region, the FILL13 sequence region, and the FILL17 sequence region. In one embodiment, the filler sequence region is the FILL6 sequence region, the FILL13 sequence region, and the FILL18 sequence region. In one embodiment, the filler sequence region is the FILL6 sequence region, the FILL14 sequence region, and the FILL15 sequence region. In one embodiment, the filler sequence region is the FILL6 sequence region, the FILL14 sequence region, and the FILL16 sequence region. In one embodiment, the filler sequence region is the FILL6 sequence region, the FILL14 sequence region, and the FILL17 sequence region. In one embodiment, the filler sequence region is the FILL6 sequence region, the FILL14 sequence region, and the FILL18 sequence region. In one embodiment, the filler sequence region is the FILL6 sequence region, the FILL15 sequence region, and the FILL16 sequence region. In one embodiment, the filler sequence region is the FILL6 sequence region, the FILL15 sequence region, and the FILL17 sequence region. In one embodiment, the filler sequence region is the FILL6 sequence region, the FILL15 sequence region, and the FILL18 sequence region. In one embodiment, the filler sequence region is the FILL6 sequence region, the FILL16 sequence region, and the FILL17 sequence region. In one embodiment, the filler sequence region is the FILL6 sequence region, the FILL16 sequence region, and the FILL18 sequence region. In one embodiment, the filler sequence region is the FILL6 sequence region, the FILL17 sequence region, and the FILL18 sequence region. In one embodiment, the filler sequence region is the FILL7 sequence region, the FILL8 sequence region, and the FILL9 sequence region. In one embodiment, the filler sequence region is the FILL7 sequence region, the FILL8 sequence region, and the FILL10 sequence region. In one embodiment, the filler sequence region is the FILL7 sequence region, the FILL8 sequence region, and the FILL11 sequence region. In one embodiment, the filler sequence region is the FILL7 sequence region, the FILL8 sequence region, and the FILL12 sequence region. In one embodiment, the filler sequence region is the FILL7 sequence region, the FILL8 sequence region, and the FILL13 sequence region. In one embodiment, the filler sequence region is the FILL7 sequence region, the FILL8 sequence region, and the FILL14 sequence region. In one embodiment, the filler sequence region is the FILL7 sequence region, the FILL8 sequence region, and the FILL15 sequence region. In one embodiment, the filler sequence region is the FILL7 sequence region, the FILL8 sequence region, and the FILL16 sequence region. In one embodiment, the filler sequence region is the FILL7 sequence region, the FILL8 sequence region, and the FILL17 sequence region. In one embodiment, the filler sequence region is the FILL7 sequence region, the FILL8 sequence region, and the FILL18 sequence region. In one embodiment, the filler sequence region is the FILL7 sequence region, the FILL9 sequence region, and the FILL10 sequence region. In one embodiment, the filler sequence region is the FILL7 sequence region, the FILL9 sequence region, and the FILL11 sequence region. In one embodiment, the filler sequence region is the FILL7 sequence region, the FILL9 sequence region, and the FILL12 sequence region. In one embodiment, the filler sequence region is the FILL7 sequence region, the FILL9 sequence region, and the FILL13 sequence region. In one embodiment, the filler sequence region is the FILL7 sequence region, the FILL9 sequence region, and the FILL14 sequence region. In one embodiment, the filler sequence region is the FILL7 sequence region, the FILL9 sequence region, and the FILL15 sequence region. In one embodiment, the filler sequence region is the FILL7 sequence region, the FILL9 sequence region, and the FILL16 sequence region. In one embodiment, the filler sequence region is the FILL7 sequence region, the FILL9 sequence region, and the FILL17 sequence region. In one embodiment, the filler sequence region is the FILL7 sequence region, the FILL9 sequence region, and the FILL18 sequence region. In one embodiment, the filler sequence region is the FILL7 sequence region, the FILL10 sequence region, and the FILL1 sequence region. In one embodiment, the filler sequence region is the FILL7 sequence region, the FILL10 sequence region, and the FILL12 sequence region. In one embodiment, the filler sequence region is the FILL7 sequence region, the FILL10 sequence region, and the FILL13 sequence region. In one embodiment, the filler sequence region is the FILL7 sequence region, the FILL10 sequence region, and the FILL14 sequence region. In one embodiment, the filler sequence region is the FILL7 sequence region, the FILL10 sequence region, and the FILL15 sequence region. In one embodiment, the filler sequence region is the FILL7 sequence region, the FILL10 sequence region, and the FILL16 sequence region. In one embodiment, the filler sequence region is the FILL7 sequence region, the FILL10 sequence region, and the FILL17 sequence region. In one embodiment, the filler sequence region is the FILL7 sequence region, the FILL10 sequence region, and the FILL18 sequence region. In one embodiment, the filler sequence region is the FILL7 sequence region, the FILL11 sequence region, and the FILL12 sequence region. In one embodiment, the filler sequence region is the FILL7 sequence region, the FILL11 sequence region, and the FILL13 sequence region. In one embodiment, the filler sequence region is the FILL7 sequence region, the FILL11 sequence region, and the FILL14 sequence region. In one embodiment, the filler sequence region is the FILL7 sequence region, the FILL11 sequence region, and the FILL15 sequence region. In one embodiment, the filler sequence region is the FILL7 sequence region, the FILL11 sequence region, and the FILL16 sequence region. In one embodiment, the filler sequence region is the FILL7 sequence region, the FILL11 sequence region, and the FILL17 sequence region. In one embodiment, the filler sequence region is the FILL7 sequence region, the FILL11 sequence region, and the FILL18 sequence region. In one embodiment, the filler sequence region is the FILL7 sequence region, the FILL12 sequence region, and the FILL13 sequence region. In one embodiment, the filler sequence region is the FILL7 sequence region, the FILL12 sequence region, and the FILL14 sequence region. In one embodiment, the filler sequence region is the FILL7 sequence region, the FILL12 sequence region, and the FILL15 sequence region. In one embodiment, the filler sequence region is the FILL7 sequence region, the FILL12 sequence region, and the FILL16 sequence region. In one embodiment, the filler sequence region is the FILL7 sequence region, the FILL12 sequence region, and the FILL17 sequence region. In one embodiment, the filler sequence region is the FILL7 sequence region, the FILL12 sequence region, and the FILL18 sequence region. In one embodiment, the filler sequence region is the FILL7 sequence region, the FILL13 sequence region, and the FILL14 sequence region. In one embodiment, the filler sequence region is the FILL7 sequence region, the FILL13 sequence region, and the FILL15 sequence region. In one embodiment, the filler sequence region is the FILL7 sequence region, the FILL13 sequence region, and the FILL16 sequence region. In one embodiment, the filler sequence region is the FILL7 sequence region, the FILL13 sequence region, and the FILL17 sequence region. In one embodiment, the filler sequence region is the FILL7 sequence region, the FILL13 sequence region, and the FILL18 sequence region. In one embodiment, the filler sequence region is the FILL7 sequence region, the FILL14 sequence region, and the FILL15 sequence region. In one embodiment, the filler sequence region is the FILL7 sequence region, the FILL14 sequence region, and the FILL16 sequence region. In one embodiment, the filler sequence region is the FILL7 sequence region, the FILL14 sequence region, and the FILL17 sequence region. In one embodiment, the filler sequence region is the FILL7 sequence region, the FILL14 sequence region, and the FILL18 sequence region. In one embodiment, the filler sequence region is the FILL7 sequence region, the FILL15 sequence region, and the FILL16 sequence region. In one embodiment, the filler sequence region is the FILL7 sequence region, the FILL15 sequence region, and the FILL17 sequence region. In one embodiment, the filler sequence region is the FILL7 sequence region, the FILL15 sequence region, and the FILL18 sequence region. In one embodiment, the filler sequence region is the FILL7 sequence region, the FILL16 sequence region, and the FILL17 sequence region. In one embodiment, the filler sequence region is the FILL7 sequence region, the FILL16 sequence region, and the FILL18 sequence region. In one embodiment, the filler sequence region is the FILL7 sequence region, the FILL17 sequence region, and the FILL18 sequence region. In one embodiment, the filler sequence region is the FILL8 sequence region, the FILL9 sequence region, and the FILL10 sequence region. In one embodiment, the filler sequence region is the FILL8 sequence region, the FILL9 sequence region, and the FILL11 sequence region. In one embodiment, the filler sequence region is the FILL8 sequence region, the FILL9 sequence region, and the FILL12 sequence region. In one embodiment, the filler sequence region is the FILL8 sequence region, the FILL9 sequence region, and the FILL13 sequence region. In one embodiment, the filler sequence region is the FILL8 sequence region, the FILL9 sequence region, and the FILL14 sequence region. In one embodiment, the filler sequence region is the FILL8 sequence region, the FILL9 sequence region, and the FILL15 sequence region. In one embodiment, the filler sequence region is the FILL8 sequence region, the FILL9 sequence region, and the FILL16 sequence region. In one embodiment, the filler sequence region is the FILL8 sequence region, the FILL9 sequence region, and the FILL17 sequence region. In one embodiment, the filler sequence region is the FILL8 sequence region, the FILL9 sequence region, and the FILL18 sequence region. In one embodiment, the filler sequence region is the FILL8 sequence region, the FILL10 sequence region, and the FILL11 sequence region. In one embodiment, the filler sequence region is the FILL8 sequence region, the FILL10 sequence region, and the FILL12 sequence region. In one embodiment, the filler sequence region is the FILL8 sequence region, the FILL10 sequence region, and the FILL13 sequence region. In one embodiment, the filler sequence region is the FILL8 sequence region, the FILL10 sequence region, and the FILL14 sequence region. In one embodiment, the filler sequence region is the FILL8 sequence region, the FILL10 sequence region, and the FILL15 sequence region. In one embodiment, the filler sequence region is the FILL8 sequence region, the FILL10 sequence region, and the FILL16 sequence region. In one embodiment, the filler sequence region is the FILL8 sequence region, the FILL10 sequence region, and the FILL17 sequence region. In one embodiment, the filler sequence region is the FILL8 sequence region, the FILL10 sequence region, and the FILL18 sequence region. In one embodiment, the filler sequence region is the FILL8 sequence region, the FILL11 sequence region, and the FILL12 sequence region. In one embodiment, the filler sequence region is the FILL8 sequence region, the FILL11 sequence region, and the FILL13 sequence region. In one embodiment, the filler sequence region is the FILL8 sequence region, the FILL11 sequence region, and the FILL14 sequence region. In one embodiment, the filler sequence region is the FILL8 sequence region, the FILL11 sequence region, and the FILL15 sequence region. In one embodiment, the filler sequence region is the FILL8 sequence region, the FILL11 sequence region, and the FILL16 sequence region. In one embodiment, the filler sequence region is the FILL8 sequence region, the FILL11 sequence region, and the FILL17 sequence region. In one embodiment, the filler sequence region is the FILL8 sequence region, the FILL11 sequence region, and the FILL18 sequence region. In one embodiment, the filler sequence region is the FILL8 sequence region, the FILL12 sequence region, and the FILL13 sequence region. In one embodiment, the filler sequence region is the FILL8 sequence region, the FILL12 sequence region, and the FILL14 sequence region. In one embodiment, the filler sequence region is the FILL8 sequence region, the FILL12 sequence region, and the FILL15 sequence region. In one embodiment, the filler sequence region is the FILL8 sequence region, the FILL12 sequence region, and the FILL16 sequence region. In one embodiment, the filler sequence region is the FILL8 sequence region, the FILL12 sequence region, and the FILL17 sequence region. In one embodiment, the filler sequence region is the FILL8 sequence region, the FILL12 sequence region, and the FILL18 sequence region. In one embodiment, the filler sequence region is the FILL8 sequence region, the FILL13 sequence region, and the FILL14 sequence region. In one embodiment, the filler sequence region is the FILL8 sequence region, the FILL13 sequence region, and the FILL15 sequence region. In one embodiment, the filler sequence region is the FILL8 sequence region, the FILL13 sequence region, and the FILL16 sequence region. In one embodiment, the filler sequence region is the FILL8 sequence region, the FILL13 sequence region, and the FILL17 sequence region. In one embodiment, the filler sequence region is the FILL8 sequence region, the FILL13 sequence region, and the FILL18 sequence region. In one embodiment, the filler sequence region is the FILL8 sequence region, the FILL14 sequence region, and the FILL15 sequence region. In one embodiment, the filler sequence region is the FILL8 sequence region, the FILL14 sequence region, and the FILL16 sequence region. In one embodiment, the filler sequence region is the FILL8 sequence region, the FILL14 sequence region, and the FILL17 sequence region. In one embodiment, the filler sequence region is the FILL8 sequence region, the FILL14 sequence region, and the FILL18 sequence region. In one embodiment, the filler sequence region is the FILL5 sequence region, the FILL15 sequence region, and the FILL16 sequence region. In one embodiment, the filler sequence region is the FILL8 sequence region, the FILL15 sequence region, and the FILL17 sequence region. In one embodiment, the filler sequence region is the FILL8 sequence region, the FILL15 sequence region, and the FILL18 sequence region. In one embodiment, the filler sequence region is the FILL8 sequence region, the FILL16 sequence region, and the FILL17 sequence region. In one embodiment, the filler sequence region is the FILL8 sequence region, the FILL16 sequence region, and the FILL18 sequence region. In one embodiment, the filler sequence region is the FILL8 sequence region, the FILL17 sequence region, and the FILL18 sequence region. In one embodiment, the filler sequence region is the FILL9 sequence region, the FILL10 sequence region, and the FILL11 sequence region. In one embodiment, the filler sequence region is the FILL9 sequence region, the FILL10 sequence region, and the FILL12 sequence region. In one embodiment, the filler sequence region is the FILL9 sequence region, the FILL10 sequence region, and the FILL13 sequence region. In one embodiment, the filler sequence region is the FILL9 sequence region, the FILL10 sequence region, and the FILL14 sequence region. In one embodiment, the filler sequence region is the FILL9 sequence region, the FILL10 sequence region, and the FILL15 sequence region. In one embodiment, the filler sequence region is the FILL9 sequence region, the FILL10 sequence region, and the FILL16 sequence region. In one embodiment, the filler sequence region is the FILL9 sequence region, the FILL10 sequence region, and the FILL17 sequence region. In one embodiment, the filler sequence region is the FILL9 sequence region, the FILL10 sequence region, and the FILL18 sequence region. In one embodiment, the filler sequence region is the FILL9 sequence region, the FILL11 sequence region, and the FILL12 sequence region. In one embodiment, the filler sequence region is the FILL9 sequence region, the FILL11 sequence region, and the FILL13 sequence region. In one embodiment, the filler sequence region is the FILL9 sequence region, the FILL11 sequence region, and the FILL14 sequence region. In one embodiment, the filler sequence region is the FILL9 sequence region, the FILL11 sequence region, and the FILL15 sequence region. In one embodiment, the filler sequence region is the FILL9 sequence region, the FILL11 sequence region, and the FILL16 sequence region. In one embodiment, the filler sequence region is the FILL9 sequence region, the FILL11 sequence region, and the FILL17 sequence region. In one embodiment, the filler sequence region is the FILL9 sequence region, the FILL11 sequence region, and the FILL18 sequence region. In one embodiment, the filler sequence region is the FILL9 sequence region, the FILL12 sequence region, and the FILL13 sequence region. In one embodiment, the filler sequence region is the FILL9 sequence region, the FILL12 sequence region, and the FILL14 sequence region. In one embodiment, the filler sequence region is the FILL9 sequence region, the FILL12 sequence region, and the FILL15 sequence region. In one embodiment, the filler sequence region is the FILL9 sequence region, the FILL12 sequence region, and the FILL16 sequence region. In one embodiment, the filler sequence region is the FILL9 sequence region, the FILL12 sequence region, and the FILL17 sequence region. In one embodiment, the filler sequence region is the FILL9 sequence region, the FILL12 sequence region, and the FILL18 sequence region. In one embodiment, the filler sequence region is the FILL9 sequence region, the FILL13 sequence region, and the FILL14 sequence region. In one embodiment, the filler sequence region is the FILL9 sequence region, the FILL13 sequence region, and the FILL15 sequence region. In one embodiment, the filler sequence region is the FILL9 sequence region, the FILL13 sequence region, and the FILL16 sequence region. In one embodiment, the filler sequence region is the FILL9 sequence region, the FILL13 sequence region, and the FILL17 sequence region. In one embodiment, the filler sequence region is the FILL9 sequence region, the FILL13 sequence region, and the FILL18 sequence region. In one embodiment, the filler sequence region is the FILL9 sequence region, the FILL14 sequence region, and the FILL15 sequence region. In one embodiment, the filler sequence region is the FILL9 sequence region, the FILL14 sequence region, and the FILL16 sequence region. In one embodiment, the filler sequence region is the FILL9 sequence region, the FILL14 sequence region, and the FILL17 sequence region. In one embodiment, the filler sequence region is the FILL9 sequence region, the FILL14 sequence region, and the FILL18 sequence region. In one embodiment, the filler sequence region is the FILL9 sequence region, the FILL15 sequence region, and the FILL16 sequence region. In one embodiment, the filler sequence region is the FILL9 sequence region, the FILL15 sequence region, and the FILL17 sequence region. In one embodiment, the filler sequence region is the FILL9 sequence region, the FILL15 sequence region, and the FILL18 sequence region. In one embodiment, the filler sequence region is the FILL9 sequence region, the FILL16 sequence region, and the FILL17 sequence region. In one embodiment, the filler sequence region is the FILL9 sequence region, the FILL16 sequence region, and the FILL18 sequence region. In one embodiment, the filler sequence region is the FILL9 sequence region, the FILL17 sequence region, and the FILL18 sequence region. In one embodiment, the filler sequence region is the FILL10 sequence region, the FILL11 sequence region, and the FILL12 sequence region. In one embodiment, the filler sequence region is the FILL10 sequence region, the FILL1 sequence region, and the FILL13 sequence region. In one embodiment, the filler sequence region is the FILL10 sequence region, the FILL11 sequence region, and the FILL14 sequence region. In one embodiment, the filler sequence region is the FILL10 sequence region, the FILL11 sequence region, and the FILL15 sequence region. In one embodiment, the filler sequence region is the FILL10 sequence region, the FILL11 sequence region, and the FILL16 sequence region. In one embodiment, the filler sequence region is the FILL10 sequence region, the FILL11 sequence region, and the FILL17 sequence region. In one embodiment, the filler sequence region is the FILL10 sequence region, the FILL11 sequence region, and the FILL18 sequence region. In one embodiment, the filler sequence region is the FILL10 sequence region, the FILL12 sequence region, and the FILL13 sequence region. In one embodiment, the filler sequence region is the FILL10 sequence region, the FILL12 sequence region, and the FILL14 sequence region. In one embodiment, the filler sequence region is the FILL10 sequence region, the FILL12 sequence region, and the FILL15 sequence region. In one embodiment, the filler sequence region is the FILL10 sequence region, the FILL12 sequence region, and the FILL16 sequence region. In one embodiment, the filler sequence region is the FILL10 sequence region, the FILL12 sequence region, and the FILL17 sequence region. In one embodiment, the filler sequence region is the FILL10 sequence region, the FILL12 sequence region, and the FILL18 sequence region. In one embodiment, the filler sequence region is the FILL10 sequence region, the FILL13 sequence region, and the FILL14 sequence region. In one embodiment, the filler sequence region is the FILL10 sequence region, the FILL13 sequence region, and the FILL15 sequence region. In one embodiment, the filler sequence region is the FILL10 sequence region, the FILL13 sequence region, and the FILL16 sequence region. In one embodiment, the filler sequence region is the FILL10 sequence region, the FILL13 sequence region, and the FILL17 sequence region. In one embodiment, the filler sequence region is the FILL10 sequence region, the FILL13 sequence region, and the FILL18 sequence region. In one embodiment, the filler sequence region is the FILL10 sequence region, the FILL14 sequence region, and the FILL15 sequence region. In one embodiment, the filler sequence region is the FILL10 sequence region, the FILL14 sequence region, and the FILL16 sequence region. In one embodiment, the filler sequence region is the FILL10 sequence region, the FILL14 sequence region, and the FILL17 sequence region. In one embodiment, the filler sequence region is the FILL10 sequence region, the FILL14 sequence region, and the FILL18 sequence region. In one embodiment, the filler sequence region is the FILL10 sequence region, the FILL15 sequence region, and the FILL16 sequence region. In one embodiment, the filler sequence region is the FILL10 sequence region, the FILL5 sequence region, and the FILL17 sequence region. In one embodiment, the filler sequence region is the FILL10 sequence region, the FILL15 sequence region, and the FILL18 sequence region. In one embodiment, the filler sequence region is the FILL10 sequence region, the FILL16 sequence region, and the FILL17 sequence region. In one embodiment, the filler sequence region is the FILL10 sequence region, the FILL16 sequence region, and the FILL18 sequence region. In one embodiment, the filler sequence region is the FILL10 sequence region, the FILL17 sequence region, and the FILL18 sequence region. In one embodiment, the filler sequence region is the FILL11 sequence region, the FILL12 sequence region, and the FILL13 sequence region. In one embodiment, the filler sequence region is the FILL11 sequence region, the FILL12 sequence region, and the FILL14 sequence region. In one embodiment, the filler sequence region is the FILL11 sequence region, the FILL12 sequence region, and the FILL15 sequence region. In one embodiment, the filler sequence region is the FILL11 sequence region, the FILL12 sequence region, and the FILL16 sequence region. In one embodiment, the filler sequence region is the FILL11 sequence region, the FILL12 sequence region, and the FILL17 sequence region. In one embodiment, the filler sequence region is the FILL11 sequence region, the FILL12 sequence region, and the FILL18 sequence region. In one embodiment, the filler sequence region is the FILL11 sequence region, the FILL13 sequence region, and the FILL14 sequence region. In one embodiment, the filler sequence region is the FILL11 sequence region, the FILL13 sequence region, and the FILL15 sequence region. In one embodiment, the filler sequence region is the FILL11 sequence region, the FILL13 sequence region, and the FILL16 sequence region. In one embodiment, the filler sequence region is the FILL11 sequence region, the FILL13 sequence region, and the FILL17 sequence region. In one embodiment, the filler sequence region is the FILL11 sequence region, the FILL13 sequence region, and the FILL18 sequence region. In one embodiment, the filler sequence region is the FILL11 sequence region, the FILL14 sequence region, and the FILL15 sequence region. In one embodiment, the filler sequence region is the FILL11 sequence region, the FILL14 sequence region, and the FILL16 sequence region. In one embodiment, the filler sequence region is the FILL11 sequence region, the FILL14 sequence region, and the FILL17 sequence region. In one embodiment, the filler sequence region is the FILL11 sequence region, the FILL14 sequence region, and the FILL18 sequence region. In one embodiment, the filler sequence region is the FILL11 sequence region, the FILL15 sequence region, and the FILL16 sequence region. In one embodiment, the filler sequence region is the FILL11 sequence region, the FILL15 sequence region, and the FILL17 sequence region. In one embodiment, the filler sequence region is the FILL11 sequence region, the FILL5 sequence region, and the FILL18 sequence region. In one embodiment, the filler sequence region is the FILL11 sequence region, the FILL16 sequence region, and the FILL17 sequence region. In one embodiment, the filler sequence region is the FILL11 sequence region, the FILL16 sequence region, and the FILL18 sequence region. In one embodiment, the filler sequence region is the FILL11 sequence region, the FILL17 sequence region, and the FILL18 sequence region. In one embodiment, the filler sequence region is the FILL12 sequence region, the FILL13 sequence region, and the FILL14 sequence region. In one embodiment, the filler sequence region is the FILL12 sequence region, the FILL13 sequence region, and the FILL15 sequence region. In one embodiment, the filler sequence region is the FILL12 sequence region, the FILL13 sequence region, and the FILL16 sequence region. In one embodiment, the filler sequence region is the FILL12 sequence region, the FILL13 sequence region, and the FILL17 sequence region. In one embodiment, the filler sequence region is the FILL12 sequence region, the FILL13 sequence region, and the FILL18 sequence region. In one embodiment, the filler sequence region is the FILL12 sequence region, the FILL14 sequence region, and the FILL15 sequence region. In one embodiment, the filler sequence region is the FILL12 sequence region, the FILL14 sequence region, and the FILL16 sequence region. In one embodiment, the filler sequence region is the FILL12 sequence region, the FILL14 sequence region, and the FILL17 sequence region. In one embodiment, the filler sequence region is the FILL12 sequence region, the FILL14 sequence region, and the FILL18 sequence region. In one embodiment, the filler sequence region is the FILL12 sequence region, the FILL15 sequence region, and the FILL16 sequence region. In one embodiment, the filler sequence region is the FILL12 sequence region, the FILL15 sequence region, and the FILL17 sequence region. In one embodiment, the filler sequence region is the FILL12 sequence region, the FILL15 sequence region, and the FILL18 sequence region. In one embodiment, the filler sequence region is the FILL12 sequence region, the FILL16 sequence region, and the FILL17 sequence region. In one embodiment, the filler sequence region is the FILL12 sequence region, the FILL16 sequence region, and the FILL18 sequence region. In one embodiment, the filler sequence region is the FILL12 sequence region, the FILL17 sequence region, and the FILL18 sequence region. In one embodiment, the filler sequence region is the FILL13 sequence region, the FILL14 sequence region, and the FILL15 sequence region. In one embodiment, the filler sequence region is the FILL13 sequence region, the FILL14 sequence region, and the FILL16 sequence region. In one embodiment, the filler sequence region is the FILL13 sequence region, the FILL14 sequence region, and the FILL17 sequence region. In one embodiment, the filler sequence region is the FILL13 sequence region, the FILL14 sequence region, and the FILL18 sequence region. In one embodiment, the filler sequence region is the FILL13 sequence region, the FILL15 sequence region, and the FILL16 sequence region. In one embodiment, the filler sequence region is the FILL13 sequence region, the FILL15 sequence region, and the FILL17 sequence region. In one embodiment, the filler sequence region is the FILL13 sequence region, the FILL15 sequence region, and the FILL18 sequence region. In one embodiment, the filler sequence region is the FILL13 sequence region, the FILL16 sequence region, and the FILL17 sequence region. In one embodiment, the filler sequence region is the FILL13 sequence region, the FILL16 sequence region, and the FILL18 sequence region. In one embodiment, the filler sequence region is the FILL13 sequence region, the FILL17 sequence region, and the FILL18 sequence region. In one embodiment, the filler sequence region is the FILL14 sequence region, the FILL15 sequence region, and the FILL16 sequence region. In one embodiment, the filler sequence region is the FILL14 sequence region, the FILL15 sequence region, and the FILL17 sequence region. In one embodiment, the filler sequence region is the FILL14 sequence region, the FILL15 sequence region, and the FILL18 sequence region. In one embodiment, the filler sequence region is the FILL14 sequence region, the FILL16 sequence region, and the FILL17 sequence region. In one embodiment, the filler sequence region is the FILL14 sequence region, the FILL16 sequence region, and the FILL18 sequence region. In one embodiment, the filler sequence region is the FILL14 sequence region, the FILL17 sequence region, and the FILL18 sequence region. In one embodiment, the filler sequence region is the FILL15 sequence region, the FILL16 sequence region, and the FILL17 sequence region. In one embodiment, the filler sequence region is the FILL15 sequence region, the FILL16 sequence region, and the FILL18 sequence region. In one embodiment, the filler sequence region is the FILL15 sequence region, the FILL17 sequence region, and the FILL18 sequence region. In one embodiment, the filler sequence region is the FILL16 sequence region, the FILL17 sequence region, and the FILL18 sequence region.

[0546] In one embodiment, the AAV particle viral genome may comprise at least one enhancer sequence region. The enhancer sequence region(s) may, independently, have a length such as, but not limited to, 300, 301, 302, 303, 304, 305, 306, 307, 308, 309, 310, 311, 312, 313, 314, 315, 316, 317, 318, 319, 320, 321, 322, 323, 324, 325, 326, 327, 328, 329, 330, 331, 332, 333, 334, 335, 336, 337, 338, 339, 340, 341, 342, 343, 344, 345, 346, 347, 348, 349, 350, 351, 352, 353, 354, 355, 356, 357, 358, 359, 360, 361, 362, 363, 364, 365, 366, 367, 368, 369, 370, 371, 372, 373, 374, 375, 376, 377, 378, 379, 380, 381, 382, 383, 384, 385, 386, 387, 388, 389, 390, 391, 392, 393, 394, 395, 396, 397, 398, 399, and 400 nucleotides. The length of the enhancer region for the viral genome may be 300-310, 300-325, 305-315, 310-320, 315-325, 320-330, 325-335, 325-350, 330-340, 335-345, 340-350, 345-355, 350-360, 350-375, 355-365, 360-370, 365-375, 370-380, 375-385, 375-400, 380-390, 385-395, and 390-400 nucleotides. As a non-limiting example, the viral genome comprises an enhancer region that is about 303 nucleotides in length. As a non-limiting example, the viral genome comprises an enhancer region that is about 382 nucleotides in length.

[0547] In one embodiment, the AAV particle viral genome comprises at least one enhancer sequence region. Non-limiting examples of enhancer sequence regions are described in Table 13.

TABLE 13
Enhancer Sequence Regions

| Sequence Region Name | SEQ ID NO |
|---|---|
| Enhancer1 | 1397 |
| Enhancer2 | 1398 |

[0548] In one embodiment, the AAV particle viral genome comprises one enhancer sequence region. In one embodiment, the enhancer sequence regions is the Enhancer1 sequence region. In one embodiment, the enhancer sequence regions is the Enhancer2 sequence region.

[0549] In one embodiment, the AAV particle viral genome comprises two enhancer sequence regions. In one embodiment, the enhancer sequence regions are the Enhancer1 sequence region and the Enhancer 2 sequence region.

[0550] In one embodiment, the AAV particle viral genome may comprise at least one promoter sequence region. The promoter sequence region(s) may, independently, have a length such as, but not limited to, 4, 5, 6, 7, 8, 9, 10, 11, 12, 13, 14, 15, 16, 17, 18, 19, 20, 21, 22, 23, 24, 25, 26, 27, 28, 29, 30, 31, 32, 33, 34, 35, 36, 37, 38, 39, 40, 41, 42, 43, 44, 45, 46, 47, 48, 49, 50, 51, 52, 53, 54, 55, 56, 57, 58, 59, 60, 61, 62, 63, 64, 65, 66, 67, 68, 69, 70, 71, 72, 73, 74, 75, 76, 77, 78, 79, 80, 81, 82, 83, 84, 85, 86, 87, 88, 89, 90, 91, 92, 93, 94, 95, 96, 97, 98, 99, 100, 101, 102, 103, 104, 105, 106, 107, 108, 109, 110, 111, 112, 113, 114, 115, 116, 117, 118, 119, 120, 121, 122, 123, 124, 125, 126, 127, 128, 129, 130, 131, 132, 133, 134, 135, 136, 137, 138, 139, 140, 141, 142, 143, 144, 145, 146, 147, 148, 149, 150, 151, 152, 153, 154, 155, 156, 157, 158, 159, 160, 161, 162, 163, 164, 165, 166, 167, 168, 169, 170, 171, 172, 173, 174, 175, 176, 177, 178, 179, 180, 181, 182, 183, 184, 185, 186, 187, 188, 189, 190, 191, 192, 193, 194, 195, 196, 197, 198, 199, 200, 201, 202, 203, 204, 205, 206, 207, 208, 209, 210, 211, 212, 213, 214, 215, 216, 217, 218, 219, 220, 221, 222, 223, 224, 225, 226, 227, 228, 229, 230, 231, 232, 233, 234, 235, 236, 237, 238, 239, 240, 241, 242, 243, 244, 245, 246, 247, 248, 249, 250, 251, 252, 253, 254, 255, 256, 257, 258, 259, 260, 261, 262, 263, 264, 265, 266, 267, 268, 269, 270, 271, 272, 273, 274, 275, 276, 277, 278, 279, 280, 281, 282, 283, 284, 285, 286, 287, 288, 289, 290, 291, 292, 293, 294, 295, 296, 297, 298, 299, 300, 301, 302, 303, 304, 305, 306, 307, 308, 309, 310, 311, 312, 313, 314, 315, 316, 317, 318, 319, 320, 321, 322, 323, 324, 325, 326, 327, 328, 329, 330, 331, 332, 333, 334, 335, 336, 337, 338, 339, 340, 341, 342, 343, 344, 345, 346, 347, 348, 349, 350, 351, 352, 353, 354, 355, 356, 357, 358, 359, 360, 361, 362, 363, 364, 365, 366, 367, 368, 369, 370, 371, 372, 373, 374, 375, 376, 377, 378, 379, 380, 381, 382, 383, 384, 385, 386, 387, 388, 389, 390, 391, 392, 393, 394, 395, 396, 397, 398, 399, 400, 401, 402, 403, 404, 405, 406, 407, 408, 409, 410, 411, 412, 413, 414, 415, 416, 417, 418, 419, 420, 421, 422, 423, 424, 425, 426, 427, 428, 429, 430, 431, 432, 433, 434, 435, 436, 437, 438, 439, 440, 441, 442, 443, 444, 445, 446, 447, 448, 449, 450, 451, 452, 453, 454, 455, 456, 457, 458, 459, 460, 461, 462, 463, 464, 465, 466, 467, 468, 469, 470, 471, 472, 473, 474, 475, 476, 477, 478, 479, 480, 481, 482, 483, 484, 485, 486, 487, 488, 489, 490, 491, 492, 493, 494, 495, 496, 497, 498, 499, 500, 501, 502, 503, 504, 505, 506, 507, 508, 509, 510, 511, 512, 513, 514, 515, 516, 517, 518, 519, 520, 521, 522, 523, 524, 525, 526, 527, 528, 529, 530, 531, 532, 533, 534, 535, 536, 537, 538, 539, 540, 541, 542, 543, 544, 545, 546, 547, 548, 549, 550, 551, 552, 553, 554, 555, 556, 557, 558, 559, 560, 561, 562, 563, 564, 565, 566, 567, 568, 569, 570, 571, 572, 573, 574, 575, 576, 577, 578, 579, 580, 581, 582, 583, 584, 585, 586, 587, 588, 589, 590, 591, 592, 593, 594, 595, 596, 597, 598, 599, and 600 nucleotides. The length of the promoter region for the viral genome may be 4-10, 10-20, 10-50, 20-30, 30-40, 40-50, 50-60, 50-100, 60-70, 70-80, 80-90, 90-100, 100-110, 100-150, 110-120, 120-130, 130-140, 140-150, 150-160, 150-200, 160-170, 170-180, 180-190, 190-200, 200-210, 200-250, 210-220, 220-230, 230-240, 240-250, 250-260, 250-300, 260-270, 270-280, 280-290, 290-300, 300-310, 300-350, 310-320, 320-330, 330-340, 340-350, 350-360, 350-400, 360-370, 370-380, 380-390, 390-400, 400-410, 400-450, 410-420, 420-430, 430-440, 440-450, 450-460, 450-500, 460-470, 470-480, 480-490, 490-500, 500-510, 500-550, 510-520, 520-530, 530-540, 540-550, 550-560, 550-600, 560-570, 570-580, 580-590, and 590-600 nucleotides. As a non-limiting example, the viral genome comprises a promoter region that is about 4 nucleotides in length. As a non-limiting example, the viral genome comprises a promoter region that is about 17 nucleotides in length. As a non-limiting example, the viral genome comprises a promoter region that is about 204 nucleotides in length. As a non-limiting example, the viral genome comprises a promoter region that is about 219 nucleotides in length. As a non-limiting example, the viral genome comprises a promoter region that is about 260 nucleotides in length. As a non-limiting example, the viral genome comprises a promoter region that is about 303 nucleotides in length. As a non-limiting example, the viral genome comprises a promoter region that is about 382 nucleotides in length. As a non-limiting example, the viral genome comprises a promoter region that is about 588 nucleotides in length.

[0551] In one embodiment, the AAV particle viral genome comprises at least one promoter sequence region. Non-limiting examples of promoter sequence regions are described in Table 14.

TABLE 14
Promoter Sequence Regions

| | SEQ ID NO or |
|---|---|
| Sequence Region Name | Sequence |
| Promoter1 | 1399 |
| Promoter2 | 1400 |
| Promoter3 | GTTG |
| Promoter4 | 1401 |
| Promoter5 | 1402 |
| Promoter6 | 1403 |

[0552] In one embodiment, the AAV particle viral genome comprises one promoter sequence region. In one embodiment, the promoter sequence region is Promoter1. In one embodiment, the promoter sequence region is Promoter2. In one embodiment, the promoter sequence region is Promoter3. In one embodiment, the promoter sequence region is Promoter4. In one embodiment, the promoter sequence region is Promoter5. In one embodiment, the promoter sequence region is Promoter6.

[0553] In one embodiment, the AAV particle viral genome comprises two promoter sequence regions. In one embodiment, the promoter sequence region is Promoter1 sequence region, and the Promoter2 sequence region. In one embodiment, the promoter sequence region is Promoter1 sequence region, and the Promoter3 sequence region. In one embodiment, the promoter sequence region is Promoter1 sequence region, and the Promoter4 sequence region. In one embodiment, the promoter sequence region is Promoter1 sequence region, and the Promoter5 sequence region. In one embodiment, the promoter sequence region is Promoter1 sequence region, and the Promoter6 sequence region. In one embodiment, the promoter sequence region is Promoter2 sequence region, and the Promoter3 sequence region. In one embodiment, the promoter sequence region is Promoter2 sequence region, and the Promoter4 sequence region. In one embodiment, the promoter sequence region is Promoter2 sequence region, and the Promoter5 sequence region. In one embodiment, the promoter sequence region is Promoter2 sequence region, and the Promoter6 sequence region. In one embodiment, the promoter sequence region is Promoter3 sequence region, and the Promoter4 sequence region. In one embodiment, the promoter sequence region is Promoter3 sequence region, and the Promoter5 sequence region. In one embodiment, the promoter sequence region is Promoter3 sequence region, and the Promoter6 sequence region. In one embodiment, the promoter sequence region is Promoter4 sequence region, and the Promoter5 sequence region. In one embodiment, the promoter sequence region is Promoter4 sequence region, and the Promoter6 sequence region. In one embodiment, the promoter sequence region is Promoter5 sequence region, and the Promoter6 sequence region.

[0554] In one embodiment, the AAV particle viral genome may comprise at least one exon sequence region. The exon region(s) may, independently, have a length such as, but not limited to, 2, 3, 4, 5, 6, 7, 8, 9, 10, 11, 12, 13, 14, 15, 16, 17, 18, 19, 20, 21, 22, 23, 24, 25, 26, 27, 28, 29, 30, 31, 32, 33, 34, 35, 36, 37, 38, 39, 40, 41, 42, 43, 44, 45, 46, 47, 48, 49, 50, 51, 52, 53, 54, 55, 56, 57, 58, 59, 60, 61, 62, 63, 64, 65, 66, 67, 68, 69, 70, 71, 72, 73, 74, 75, 76, 77, 78, 79, 80, 81, 82, 83, 84, 85, 86, 87, 88, 89, 90, 91, 92, 93, 94, 95, 96, 97, 98, 99, 100, 101, 102, 103, 104, 105, 106, 107, 108, 109, 110, 111, 112, 113, 114, 115, 116, 117, 118, 119, 120, 121, 122, 123, 124, 125, 126, 127, 128, 129, 130, 131, 132, 133, 134, 135, 136, 137, 138, 139, 140, 141, 142, 143, 144, 145, 146, 147, 148, 149, and 150 nucleotides. The length of the exon region for the viral genome may be 2-10, 5-10, 5-15, 10-20, 10-30, 10-40, 15-20, 15-25, 20-30, 20-40, 20-50, 25-30, 25-35, 30-40, 30-50, 30-60, 35-40, 35-45, 40-50, 40-60, 40-70, 45-50, 45-55, 50-60, 50-70, 50-80, 55-60, 55-65, 60-70, 60-80, 60-90, 65-70, 65-75, 70-80, 70-90, 70-100, 75-80, 75-85, 80-90, 80-100, 80-110, 85-90, 85-95, 90-100, 90-110, 90-120, 95-100, 95-105, 100-110, 100-120, 100-130, 105-110, 105-115, 110-120, 110-130, 110-140, 115-120, 115-125, 120-130, 120-140, 120-150, 125-130, 125-135, 130-140, 130-150, 135-140, 135-145, 140-150, and 145-150 nucleotides. As a non-limiting example, the viral genome comprises an exon region that is about 53 nucleotides in length. As a non-limiting example, the viral genome comprises an exon region that is about 134 nucleotides in length.

[0555] In one embodiment, the AAV particle viral genome comprises at least one Exon sequence region. Non-limiting examples of Exon sequence regions are described in Table 15.

TABLE 15
Exon Sequence Regions

| Sequence Region Name | SEQ ID NO |
|---|---|
| Exon1 | 1404 |
| Exon2 | 1405 |

[0556] In one embodiment, the AAV particle viral genome comprises one Exon sequence region. In one embodiment, the Exon sequence regions is the Exon sequence region. In one embodiment, the Exon sequence regions is the Exon2 sequence region.

[0557] In one embodiment, the AAV particle viral genome comprises two Exon sequence regions. In one embodiment, the Exon sequence regions are the Exon1 sequence region and the Exon 2 sequence region.

[0558] In one embodiment, the AAV particle viral genome may comprise at least one intron sequence region. The intron region(s) may, independently, have a length such as, but not limited to, 25, 26, 27, 28, 29, 30, 31, 32, 33, 34, 35, 36, 37, 38, 39, 40, 41, 42, 43, 44, 45, 46, 47, 48, 49, 50, 51, 52, 53, 54, 55, 56, 57, 58, 59, 60, 61, 62, 63, 64, 65, 66, 67, 68, 69, 70, 71, 72, 73, 74, 75, 76, 77, 78, 79, 80, 81, 82, 83, 84, 85, 86, 87, 88, 89, 90, 91, 92, 93, 94, 95, 96, 97, 98, 99, 100, 101, 102, 103, 104, 105, 106, 107, 108, 109, 110, 111, 112, 113, 114, 115, 116, 117, 118, 119, 120, 121, 122, 123, 124, 125, 126, 127, 128, 129, 130, 131, 132, 133, 134, 135, 136, 137, 138, 139, 140, 141, 142, 143, 144, 145, 146, 147, 148, 149, 150, 151, 152, 153, 154, 155, 156, 157, 158, 159, 160, 161, 162, 163, 164, 165, 166, 167, 168, 169, 170, 171, 172, 173, 174, 175, 176, 177, 178, 179, 180, 181, 182, 183, 184, 185, 186, 187, 188, 189, 190, 191, 192, 193, 194, 195, 196, 197, 198, 199, 200, 201, 202, 203, 204, 205, 206, 207, 208, 209, 210, 211, 212, 213, 214, 215, 216, 217, 218, 219, 220, 221, 222, 223, 224, 225, 226, 227, 228, 229, 230, 231, 232, 233, 234, 235, 236, 237, 238, 239, 240, 241, 242, 243, 244, 245, 246, 247, 248, 249, 250, 251, 252, 253, 254, 255, 256, 257, 258, 259, 260, 261, 262, 263, 264, 265, 266, 267, 268, 269, 270, 271, 272, 273, 274, 275, 276, 277, 278, 279, 280, 281, 282, 283, 284, 285, 286, 287, 288, 289, 290, 291, 292, 293, 294, 295, 296, 297, 298, 299, 300, 301, 302, 303, 304, 305, 306, 307, 308, 309, 310, 311, 312, 313, 314, 315, 316, 317, 318, 319, 320, 321, 322, 323, 324, 325, 326, 327, 328, 329, 330, 331, 332, 333, 334, 335, 336, 337, 338, 339, 340, 341, 342, 343, 344, 345, 346, 347, 348, 349, and 350 nucleotides. The length of the intron region for the viral genome may be 25-35, 25-50, 35-45, 45-55, 50-75, 55-65, 65-75, 75-85, 75-100, 85-95, 95-105, 100-125, 105-115, 115-125, 125-135, 125-150, 135-145, 145-155, 150-175, 155-165, 165-175, 175-185, 175-200, 185-195, 195-205, 200-225, 205-215, 215-225, 225-235, 225-250, 235-245, 245-255, 250-275, 255-265, 265-275, 275-285, 275-300, 285-295, 295-305, 300-325, 305-315, 315-325, 325-335, 325-350, and 335-345 nucleotides. As a non-limiting example, the viral genome comprises an intron region that is about 32 nucleotides in length. As a non-limiting example, the viral genome comprises an intron region that is about 172 nucleotides in length. As a non-limiting example, the viral genome comprises an intron region that is about 201 nucleotides in length. As a non-limiting example, the viral genome comprises an intron region that is about 347 nucleotides in length.

[0559] In one embodiment, the AAV particle viral genome comprises at least one intron sequence region. Non-limiting examples of intron sequence regions are described in Table 16.

TABLE 16
Intron Sequence Regions

| Sequence Region Name | SEQ ID NO |
|---|---|
| Intron1 | 1406 |
| Intron2 | 1407 |
| Intron3 | 1408 |
| Intron4 | 1409 |

[0560] In one embodiment, the AAV particle viral genome comprises one intron sequence region. In one embodiment, the intron sequence regions is the Intron sequence region. In one embodiment, the intron sequence regions is the Intron2 sequence region. In one embodiment, the intron sequence regions is the Intron3 sequence region. In one embodiment, the intron sequence regions is the Intron4 sequence region.

[0561] In one embodiment, the AAV particle viral genome comprises two intron sequence regions. In one embodiment, the intron sequence regions are the Intron1 sequence region and the Intron2 sequence region. In one embodiment, the intron sequence regions are the Intron1 sequence region and the Intron3 sequence region. In one embodiment, the intron sequence regions are the Intron1 sequence region and the Intron4 sequence region. In one embodiment, the intron sequence regions are the Intron2 sequence region and the Intron3 sequence region. In one embodiment, the intron sequence regions are the Intron2 sequence region and the Intron4 sequence region. In one embodiment, the intron sequence regions are the Intron3 sequence region and the Intron4 sequence region.

[0562] In one embodiment, the AAV particle viral genome comprises three intron sequence regions. In one embodiment, the intron sequence regions are the Intron1 sequence region, the Intron2 sequence region, and the Intron3 sequence region. In one embodiment, the intron sequence regions are the Intron1 sequence region, the Intron2 sequence region, and the Intron4 sequence region. In one embodiment, the intron sequence regions are the Intron1 sequence region, the Intron3 sequence region, and the Intron4 sequence region. In one embodiment, the intron sequence regions are the Intron2 sequence region, the Intron3 sequence region, and the Intron4 sequence region.

[0563] In one embodiment, the AAV particle viral genome may comprise at least one polyadenylation signal sequence region. The polyadenylation signal region sequence region(s) may, independently, have a length such as, but not limited to, 4, 5, 6, 7, 8, 9, 10, 11, 12, 13, 14, 15, 16, 17, 18, 19, 20, 21, 22, 23, 24, 25, 26, 27, 28, 29, 30, 31, 32, 33, 34, 35, 36, 37, 38, 39, 40, 41, 42, 43, 44, 45, 46, 47, 48, 49, 50, 51, 52, 53, 54, 55, 56, 57, 58, 59, 60, 61, 62, 63, 64, 65, 66, 67, 68, 69, 70, 71, 72, 73, 74, 75, 76, 77, 78, 79, 80, 81, 82, 83, 84, 85, 86, 87, 88, 89, 90, 91, 92, 93, 94, 95, 96, 97, 98, 99, 100, 101, 102, 103, 104, 105, 106, 107, 108, 109, 110, 111, 112, 113, 114, 115, 116, 117, 118, 119, 120, 121, 122, 123, 124, 125, 126, 127, 128, 129, 130, 131, 132, 133, 134, 135, 136, 137, 138, 139, 140, 141, 142, 143, 144, 145, 146, 147, 148, 149, 150, 151, 152, 153, 154, 155, 156, 157, 158, 159, 160, 161, 162, 163, 164, 165, 166, 167, 168, 169, 170, 171, 172, 173, 174, 175, 176, 177, 178, 179, 180, 181, 182, 183, 184, 185, 186, 187, 188, 189, 190, 191, 192, 193, 194, 195, 196, 197, 198, 199, 200, 201, 202, 203, 204, 205, 206, 207, 208, 209, 210, 211, 212, 213, 214, 215, 216, 217, 218, 219, 220, 221, 222, 223, 224, 225, 226, 227, 228, 229, 230, 231, 232, 233, 234, 235, 236, 237, 238, 239, 240, 241, 242, 243, 244, 245, 246, 247, 248, 249, 250, 251, 252, 253, 254, 255, 256, 257, 258, 259, 260, 261, 262, 263, 264, 265, 266, 267, 268, 269, 270, 271, 272, 273, 274, 275, 276, 277, 278, 279, 280, 281, 282, 283, 284, 285, 286, 287, 288, 289, 290, 291, 292, 293, 294, 295, 296, 297, 298, 299, 300, 301, 302, 303, 304, 305, 306, 307, 308, 309, 310, 311, 312, 313, 314, 315, 316, 317, 318, 319, 320, 321, 322, 323, 324, 325, 326, 327, 328, 329, 330, 331, 332, 333, 334, 335, 336, 337, 338, 339, 340, 341, 342, 343, 344, 345, 346, 347, 348, 349, 350, 351, 352, 353, 354, 355, 356, 357, 358, 359, 360, 361, 362, 363, 364, 365, 366, 367, 368, 369, 370, 371, 372, 373, 374, 375, 376, 377, 378, 379, 380, 381, 382, 383, 384, 385, 386, 387, 388, 389, 390, 391, 392, 393, 394, 395, 396, 397, 398, 399, 400, 401, 402, 403, 404, 4, 400, 406, 447, 408, 409, 411, 412, 413, 414, 415, 416, 417, 418, 419, 420, 421, 422, 423, 424, 425, 426, 427, 428, 429, 430, 431, 432, 433, 434, 435, 436, 437, 438, 439, 440, 441, 442, 443, 444, 445, 446, 447, 448, 449, 450, 451, 452, 453, 454, 455, 456, 457, 458, 459, 460, 461, 462, 463, 464, 465, 466, 467, 468, 469, 470, 471, 472, 473, 474, 475, 476, 477, 478, 479, 480, 481, 482, 483, 484, 485, 486, 487, 488, 489, 490, 491, 492, 493, 494, 495, 496, 497, 498, 499, 500, 501, 502, 503, 504, 505, 506, 507, 508, 509, 510, 511, 512, 513, 514, 515, 516, 517, 518, 519, 520, 521, 522, 523, 524, 525, 526, 527, 528, 529, 530, 531, 532, 533, 534, 535, 536, 537, 538, 539, 540, 541, 542, 543, 544, 545, 546, 547, 548, 549, 550, 551, 552, 553, 554, 555, 556, 557, 558, 559, 560, 561, 562, 563, 564, 565, 566, 567, 568, 569, 570, 571, 572, 573, 574, 575, 576, 577, 578, 579, 580, 581, 582, 583, 584, 585, 586, 587, 588, 589, 590, 591, 592, 593, 594, 595, 596, 597, 598, 599, and 600 nucleotides. The length of the polyadenylation signal sequence region for the viral genome may be 4-10, 10-20, 10-50, 20-30, 30-40, 40-50, 50-60, 50-100, 60-70, 70-80, 80-90, 90-100, 100-110, 100-150, 110-120, 120-130, 130-140, 140-150, 150-160, 150-200, 160-170, 170-180, 180-190, 190-200, 200-210, 200-250, 210-220, 220-230, 230-240, 240-250, 250-260, 250-300, 260-270, 270-280, 280-290, 290-300, 300-310, 300-350, 310-320, 320-330, 330-340, 340-350, 350-360, 350-400, 360-370, 370-380, 380-390, 390-400, 400-410, 400-450, 410-420, 420-430, 430-440, 440-450, 450-460, 450-500, 460-470, 470-480, 480-490, 490-500, 500-510, 500-550, 510-520, 520-530, 530-540, 540-550, 550-560, 550-600, 560-570, 570-580, 580-590, and 590-600 nucleotides. As a non-limiting example, the viral genome comprises a polyadenylation signal sequence region that is about 127 nucleotides in length. As a non-limiting example, the viral genome comprises a polyadenylation signal sequence region that is about 225 nucleotides in length. As a non-limiting example, the viral genome comprises a polyadenylation signal sequence region that is about 476 nucleotides in length. As a non-limiting example, the viral genome comprises a polyadenylation signal sequence region that is about 477 nucleotides in length.

[0564] In one embodiment, the AAV particle viral genome comprises at least one polyadenylation (polyA) signal sequence region. Non-limiting examples of polyA signal sequence regions are described in Table 17.

TABLE 17
PolyA Signal Sequence Regions

| Sequence Region Name | SEQ ID NO |
|---|---|
| PolyA1 | 1410 |
| PolyA2 | 1411 |
| PolyA3 | 1412 |
| PolyA4 | 1413 |

[0565] In one embodiment, the AAV particle viral genome comprises one polyA signal sequence region. In one embodiment, the polyA signal sequence regions is the PolyA1 sequence region. In one embodiment, the polyA signal sequence regions is the PolyA2 sequence region. In one embodiment, the polyA signal sequence regions is the PolyA3 sequence region. In one embodiment, the polyA signal sequence regions is the PolyA4 sequence region.

[0566] In one embodiment, the AAV particle viral genome comprises more than one polyA signal sequence region.

[0567] Non-limiting examples of ITR to ITR sequences of AAV particles comprising a viral genome with a payload region comprising a modulatory polynucleotide sequence are described in Table 18.

TABLE 18
ITR to ITR Sequences of AAV Particles comprising
Modulatory Polynucleotides

| ITR to ITR | ITR to ITR | Modulatory Polynucleotide |
|---|---|---|
| Construct Name | SEQ ID NO | SEQ ID NO |
| VOYSOD1 | 1414 | 1326 |
| VOYSOD2 | 1415 | 1326 |
| VOYSOD3 | 1416 | 1317 |
| VOYSOD4 | 1417 | 1317 |
| VOYSOD5 | 2240 | 1326 |
| VOYSOD6 | 2241 | 1326 |

[0568] In one embodiment, the AAV particle comprises a viral genome which comprises a sequence which has a percent identity to any of SEQ ID NOs: 1414-1417, 2240, and 2241. The viral genome may have 1%, 2%, 3%, 4%, 5%, 6%, 7%, 8%, 9%, 10%, 15%, 20%, 25%, 30%, 35%, 40%, 45%, 50%, 55%, 60%, 65%, 70%, 75%, 80%, 85%, 90%, 95%, 99% or 100% identity to any of SEQ ID NOs: 1414-1417, 2240, and 2241. The viral genome may have 1-10%, 10-20%, 30-40%, 50-60%, 50-70%, 50-80%, 50-90%, 50-99%, 50-100%, 60-70%, 60-80%, 60-90%, 60-99%, 60-100%, 70-80%, 70-90%, 70-99%, 70-100%, 80-85%, 80-90%, 80-95%, 80-99%, 80-100%, 90-95%, 90-99%, or 90-100% to any of SEQ ID NOs: 1414-1417, 2240, and 2241. As a non-limiting example, the viral genome comprises a sequence which as 80% identity to any of SEQ ID NO: 1414-1417, 2240, and 2241. As another non-limiting example, the viral genome comprises a sequence which as 85% identity to any of SEQ ID NO: 1414-1417, 2240, and 2241. As another non-limiting example, the viral genome comprises a sequence which as 90% identity to any of SEQ ID NO: 1414-1417, 2240, and 2241. As another non-limiting example, the viral genome comprises a sequence which as 95% identity to any of SEQ ID NO: 1414-1417, 2240, and 2241. As another non-limiting example, the viral genome comprises a sequence which as 99% identity to any of SEQ ID NO: 1414-1417, 2240, and 2241.

[0569] In one embodiment, the AAV particle viral genome comprises at least one inverted terminal repeat (ITR) sequence region, at least one multiple cloning site (MCS) sequence region, at least one exon sequence region, at least one intron sequence region, at least one modulatory polynucleotide region, and at least one polyadenylation signal sequence region.

[0570] In one embodiment, the AAV particle viral genome comprises a 5′ inverted terminal repeat (ITR) sequence region and a 3′ ITR sequence region, two multiple cloning site (MCS) sequence regions, an exon sequence region, two intron sequence regions, a modulatory polynucleotide region, and a polyadenylation signal sequence region.

[0571] In one embodiment, the AAV particle viral genome comprises a 5′ inverted terminal repeat (ITR) sequence region and a 3′ ITR sequence region, two MCS sequence regions, an exon sequence regions (human beta globin (hbglobin) exon 3 or fragments thereof), two intron sequence regions (ie1 intron 1 and hbglobin intron 2 or fragments thereof), a modulatory polynucleotide region, and a rabbit betaglobin polyadenylation signal sequence region. A non-limiting example of an ITR to ITR sequence for use in the AAV particles of the present invention having all of the sequence modules above are described in Table 19. In Table 19, the sequence identifier or sequence of the sequence region (Region SEQ ID NO) and the length of the sequence region (Region length) are described as well as the name and sequence identifier of the ITR to ITR sequence (e.g., VOYSOD1 (SEQ ID NO: 1414)).

TABLE 19
Sequence Regions in ITR to ITR Sequences

| | VOYSOD1 (SEQ | | VOYSOD3 (SEQ | |
|---|---|---|---|---|
| | ID NO: 1414) | | ID NO: 1416) | |
| | Region | | Region | |
| Sequence | SEQ ID | Region | SEQ ID | Region |
| Regions | NO | length | NO | length |
| 5′ ITR | 1371 | 105 | 1371 | 105 |
| MCS | TCGAG | 5 | TCGAG | 5 |
| IE1 intron1 | 1407 | 32 | 1407 | 32 |
| hbglobin | 1408 | 347 | 1408 | 347 |
| intron2 | | | | |
| hbglobin | 1405 | 53 | 1405 | 53 |
| exon3 | | | | |
| Modulatory | 1328 | 260 | 1317 | 158 |
| Polynucleotide | | | | |
| MCS | TCGAG | 5 | TCGAG | 5 |
| Rabbit | 1410 | 127 | 1410 | 127 |
| betaglobin | | | | |
| polyA | | | | |
| 3′ ITR | 1373 | 130 | 1373 | 130 |

[0572] In one embodiment, the AAV particle viral genome comprises SEQ ID NO: 1414 (VOYSOD1) which comprises a 5′ inverted terminal repeat (ITR) sequence region and a 3′ ITR sequence region, two multiple cloning site (MCS) sequence regions, an exon sequence region, two intron sequence regions (ie1 intron 1 and hbglobin intron 2), a modulatory polynucleotide region, and a rabbit globin polyadenylation signal sequence region.

[0573] In one embodiment, the AAV particle viral genome comprises SEQ ID NO: 1416 (VOYSOD3) which comprises a 5′ inverted terminal repeat (ITR) sequence region and a 3′ ITR sequence region, two multiple cloning site (MCS) sequence regions, an exon sequence region, two intron sequence regions (ie1 intron 1 and hbglobin intron 2), a modulatory polynucleotide region, and a rabbit globin polyadenylation signal sequence region.

[0574] In one embodiment, the AAV particle viral genome comprises a 5′ inverted terminal repeat (ITR) sequence region and a 3′ ITR sequence region, a multiple cloning site (MCS) sequence region, two exon sequence regions, two intron sequence regions, a modulatory polynucleotide region, and a polyadenylation signal sequence region.

[0575] In one embodiment, the AAV particle viral genome comprises a 5′ inverted terminal repeat (ITR) sequence region and a 3′ ITR sequence region, a MCS sequence region, two exon sequence regions (ie1 exon 1, human beta globin (hbglobin) exon 3 or fragments thereof), two intron sequence regions (ie1 intron 1 and hbglobin intron 2 or fragments thereof), a modulatory polynucleotide region, and a rabbit betaglobin polyadenylation signal sequence region. A non-limiting example of an ITR to ITR sequence for use in the AAV particles of the present invention having all of the sequence modules above are described in Table 20. In Table 20, the sequence identifier or sequence of the sequence region (Region SEQ ID NO) and the length of the sequence region (Region length) are described as well as the name and sequence identifier of the ITR to ITR sequence (e.g., VOYSOD2 (SEQ ID NO: 1415)).

TABLE 20
Sequence Regions in ITR to ITR Sequences

| | VOYSOD2 (SEQ | | VOYSOD4 (SEQ | |
|---|---|---|---|---|
| | ID NO: 1415) | | ID NO: 1417) | |
| | Region | | Region | |
| Sequence | SEQ ID | Region | SEQ ID | Region |
| Regions | NO | length | NO | length |
| 5′ ITR | 1371 | 105 | 1371 | 105 |
| Ie1 exon1 | 1404 | 134 | 1404 | 134 |
| Ie1 intron1 | 1407 | 32 | 1407 | 32 |
| hbglobin | 1408 | 347 | 1408 | 347 |
| intron2 | | | | |
| hbglobin | 1405 | 53 | 1405 | 53 |
| exon3 | | | | |
| Modulatory | 1328 | 260 | 1317 | 158 |
| Polynucleotide | | | | |
| MCS | TCGAG | 5 | TCGAG | 5 |
| Rabbit | 1410 | 127 | 1410 | 127 |
| betaglobin | | | | |
| polyA | | | | |
| 3′ ITR | 1373 | 130 | 1373 | 130 |

[0576] In one embodiment, the AAV particle viral genome comprises SEQ ID NO: 1415 (VOYSOD2) which comprises a 5′ inverted terminal repeat (ITR) sequence region and a 3′ ITR sequence region, a multiple cloning site (MCS) sequence region, two exon sequence regions, two intron sequence regions (ie1 intron 1 and hbglobin intron 2), a modulatory polynucleotide region, and a rabbit globin polyadenylation signal sequence region.

[0577] In one embodiment, the AAV particle viral genome comprises SEQ ID NO: 1416 (VOYSOD4) which comprises a 5′ inverted terminal repeat (ITR) sequence region and a 3′ ITR sequence region, a multiple cloning site (MCS) sequence region, two exon sequence regions, two intron sequence regions (ie1 intron 1 and hbglobin intron 2), a modulatory polynucleotide region, and a rabbit globin polyadenylation signal sequence region.

[0578] AAV particles may be modified to enhance the efficiency of delivery. Such modified AAV particles comprising the nucleic acid sequence encoding the siRNA molecules of the present invention can be packaged efficiently and can be used to successfully infect the target cells at high frequency and with minimal toxicity.

[0579] In some embodiments, the AAV particle comprising a nucleic acid sequence encoding the siRNA molecules of the present invention may be a human serotype AAV particle. Such human AAV particle may be derived from any known serotype, e.g., from any one of serotypes AAV1-AAV11. As non-limiting examples, AAV particles may be vectors comprising an AAV1-derived genome in an AAV1-derived capsid; vectors comprising an AAV2-derived genome in an AAV2-derived capsid, vectors comprising an AAV4-derived genome in an AAV4 derived capsid; vectors comprising an AAV6-derived genome in an AAV6 derived capsid or vectors comprising an AAV9-derived genome in an AAV9 derived capsid.

[0580] In other embodiments, the AAV particle comprising a nucleic acid sequence for encoding siRNA molecules of the present invention may be a pseudotyped hybrid or chimeric AAV particle which contains sequences and/or components originating from at least two different AAV serotypes. Pseudotyped AAV particles may be vectors comprising an AAV genome derived from one AAV serotype and a capsid protein derived at least in part from a different AAV serotype. As non-limiting examples, such pseudotyped AAV particles may be vectors comprising an AAV2-derived genome in an AAV1-derived capsid; or vectors comprising an AAV2-derived genome in an AAV6-derived capsid; or vectors comprising an AAV2-derived genome in an AAV4-derived capsid: or an AAV2-derived genome in an AAV9-derived capsid. In like fashion, the present invention contemplates any hybrid or chimeric AAV particle.

[0581] In other embodiments, AAV particles comprising a nucleic acid sequence encoding the siRNA molecules of the present invention may be used to deliver siRNA molecules to the central nervous system (e.g., U.S. Pat. No. 6,180,613; the contents of which is herein incorporated by reference in its entirety).

[0582] In some aspects, the AAV particles comprising a nucleic acid sequence encoding the siRNA molecules of the present invention may further comprise a modified capsid including peptides from non-viral origin. In other aspects, the AAV particle may contain a CNS specific chimeric capsid to facilitate the delivery of encoded siRNA duplexes into the brain and the spinal cord. For example, an alignment of cap nucleotide sequences from AAV variants exhibiting CNS tropism may be constructed to identify variable region (VR) sequence and structure.

### Viral Production

[0583] The present disclosure provides a method for the generation of parvoviral particles, e.g. AAV particles, by viral genome replication in a viral replication cell comprising contacting the viral replication cell with an AAV polynucleotide or AAV genome.

[0584] The present disclosure provides a method for producing an AAV particle having enhanced (increased, improved) transduction efficiency comprising the steps of: 1) co-transfecting competent bacterial cells with a bacmid vector and either a viral construct vector and/or AAV payload construct vector, 2) isolating the resultant viral construct expression vector and AAV payload construct expression vector and separately transfecting viral replication cells, 3) isolating and purifying resultant payload and viral construct particles comprising viral construct expression vector or AAV payload construct expression vector, 4) co-infecting a viral replication cell with both the AAV payload and viral construct particles comprising viral construct expression vector or AAV payload construct expression vector, 5) harvesting and purifying the viral particle comprising a parvoviral genome.

[0585] In one embodiment, the present invention provides a method for producing an AAV particle comprising the steps of 1) simultaneously co-transfecting mammalian cells, such as, but not limited to HEK293 cells, with a payload region, a construct expressing rep and cap genes and a helper construct, 2) harvesting and purifying the AAV particle comprising a viral genome.

### Cells

[0586] The present disclosure provides a cell comprising an AAV polynucleotide and/or AAV genome.

[0587] Viral production disclosed herein describes processes and methods for producing AAV particles that contact a target cell to deliver a payload construct, e.g. a recombinant viral construct, which comprises a polynucleotide sequence encoding a payload molecule.

[0588] In one embodiment, the AAV particles may be produced in a viral replication cell that comprises an insect cell.

[0589] Growing conditions for insect cells in culture, and production of heterologous products in insect cells in culture are well-known in the art, see U.S. Pat. No. 6,204,059, the contents of which are herein incorporated by reference in their entirety.

[0590] Any insect cell which allows for replication of parvovirus and which can be maintained in culture can be used in accordance with the present invention. Cell lines may be used from Spodoptera frugiperda, including, but not limited to the Sf9 or Sf21 cell lines, Drosophila cell lines, or mosquito cell lines, such as Aedes albopictus derived cell lines. Use of insect cells for expression of heterologous proteins is well documented, as are methods of introducing nucleic acids, such as vectors, e.g., insect-cell compatible vectors, into such cells and methods of maintaining such cells in culture. See, for example, Methods in Molecular Biology, ed. Richard, Humana Press, N J (1995); O'Reilly et al., Baculovirus Expression Vectors, A Laboratory Manual, Oxford Univ. Press (1994): Samulski et al., J. Vir. 63:3822-8 (1989); Kajigaya et al., Proc. Nat'l. Acad. Sci. USA 88: 4646-50 (1991); Ruffing et al., J. Vir. 66:6922-30 (1992); Kimbauer et al., Vir. 219:37-44 (1996); Zhao et al., Vir. 272:382-93 (2000); and Samulski et at, U.S. Pat. No. 6,204,059, the contents of each of which is herein incorporated by reference in its entirety.

[0591] The viral replication cell may be selected from any biological organism, including prokaryotic (e.g., bacterial) cells, and eukaryotic cells, including, insect cells, yeast cells and mammalian cells. Viral replication cells may comprise mammalian cells such as A549, WEH1, 3T3, 10T1/2, BHK, MDCK, COS 1, COS 7, BSC 1, BSC 40, BMT 10, VERO, W138, HeLa, HEK293, Saos, C2C12, L cells, HT1080, HepG2 and primary fibroblast, hepatocyte and myoblast cells derived from mammals. Viral replication cells comprise cells derived from mammalian species including, but not limited to, human, monkey, mouse, rat, rabbit, and hamster or cell type, including but not limited to fibroblast, hepatocyte, tumor cell, cell line transformed cell, etc.

### Small Scale Production of a V Particles

[0592] Viral production disclosed herein describes processes and methods for producing AAV particles that contact a target cell to deliver a payload, e.g. a recombinant viral construct, which comprises a polynucleotide sequence encoding a payload.

[0593] In one embodiment, the AAV particles may be produced in a viral replication cell that comprises a mammalian cell.

[0594] Viral replication cells commonly used for production of recombinant AAV particles include, but are not limited to 293 cells, COS cells, HeLa cells, KB cells, and other mammalian cell lines as described in U.S. Pat. Nos. 6,156,303, 5,387,484, 5,741,683, 5,691,176, and 5,688,676; U.S. patent application 2002/0081721, and International Patent Applications WO 00/47757, WO 00/24916, and WO 96/17947, the contents of each of which are herein incorporated by reference in their entireties.

[0595] In one embodiment, AAV particles are produced in mammalian-cells wherein all three VP proteins are expressed at a stoichiometry approaching 1:1:10 (VP1:VP2:VP3). The regulatory mechanisms that allow this controlled level of expression include the production of two mRNAs, one for VP1, and the other for VP2 and VP3, produced by differential splicing.

[0596] In another embodiment. AAV particles are produced in mammalian cells using a triple transfection method wherein a payload construct, parvoviral Rep and parvoviral Cap and a helper construct are comprised within three different constructs. The triple transfection method of the three components of AAV particle production may be utilized to produce small lots of virus for assays including transduction efficiency, target tissue (tropism) evaluation, and stability.

### Baculovirus

[0597] Particle production disclosed herein describes processes and methods for producing AAV particles that contact a target cell to deliver a payload construct which comprises a polynucleotide sequence encoding a payload.

[0598] Briefly, the viral construct vector and the AAV payload construct vector are each incorporated by a transposon donor/acceptor system into a bacmid, also known as a baculovirus plasmid, by standard molecular biology techniques known and performed by a person skilled in the art. Transfection of separate viral replication cell populations produces two baculoviruses, one that comprises the viral construct expression vector, and another that comprises the AAV payload construct expression vector. The two baculoviruses may be used to infect a single viral replication cell population for production of AAV particles.

[0599] Baculovirus expression vectors for producing viral particles in insect cells, including but not limited to Spodoptera frugiperda (Sf9) cells, provide high titers of viral particle product. Recombinant baculovirus encoding the viral construct expression vector and AAV payload construct expression vector initiates a productive infection of viral replicating cells. Infectious baculovirus particles released from the primary infection secondarily infect additional cells in the culture, exponentially infecting the entire cell culture population in a number of infection cycles that is a function of the initial multiplicity of infection, see Urabe, M. et al., J Virol. 2006 February: 80 (4): 1874-85, the contents of which are herein incorporated by reference in their entirety.

[0600] Production of AAV particles with baculovirus in an insect cell system may address known baculovirus genetic and physical instability. In one embodiment, the production system addresses baculovirus instability over multiple passages by utilizing a titerless infected-cells preservation and scale-up system. Small scale seed cultures of viral producing cells are transfected with viral expression constructs encoding the structural, non-structural, components of the viral particle. Baculovirus-infected viral producing cells are harvested into aliquots that may be cryopreserved in liquid nitrogen; the aliquots retain viability and infectivity for infection of large scale viral producing cell culture Wasilko D J et al., Protein Expr Purif. 2009 June; 65(2):122-32, the contents of which are herein incorporated by reference in their entirety.

[0601] A genetically stable baculovirus may be used to produce source of the one or more of the components for producing AAV particles in invertebrate cells. In one embodiment, defective baculovirus expression vectors may be maintained episomally in insect cells. In such an embodiment the bacmid vector is engineered with replication control elements, including but not limited to promoters, enhancers, and/or cell-cycle regulated replication elements.

[0602] In one embodiment, baculoviruses may be engineered with a (non-) selectable marker for recombination into the chitinase/cathepsin locus. The chia/v-cath locus is non-essential for propagating baculovirus in tissue culture, and the V-cath (EC 3.4.22.50) is a cysteine endoprotease that is most active on Arg-Arg dipeptide containing substrates. The Arg-Arg dipeptide is present in densovirus and parvovirus capsid structural proteins but infrequently occurs in dependovirus VP1.

[0603] In one embodiment, stable viral replication cells permissive for baculovirus infection are engineered with at least one stable integrated copy of any of the elements necessary for AAV replication and viral particle production including, but not limited to, the entire AAV genome, Rep and Cap genes, Rep genes, Cap genes, each Rep protein as a separate transcription cassette, each VP protein as a separate transcription cassette, the AAP (assembly activation protein), or at least one of the baculovirus helper genes with native or non-native promoters.

### Large-Scale Production

[0604] In some embodiments, AAV particle production may be modified to increase the scale of production. Large scale viral production methods according to the present disclosure may include any of those taught in U.S. Pat. Nos. 5,756,283, 6,258,595, 6,261,551, 6,270,996, 6,281,010, 6,365,394, 6,475,769, 6,482,634, 6,485,966, 6,943,019, 6,953,690, 7,022,519, 7,238,526, 7,291,498 and 7,491,508 or International Publication Nos. WO 1996039530, WO 1998010088, WO 1999014354, WO 1999015685, WO 1999047691, WO02000055342, WO2000075353 and WO2001023597, the contents of each of which are herein incorporated by reference in their entirety. Methods of increasing viral particle production scale typically comprise increasing the number of viral replication cells. In some embodiments, viral replication cells comprise adherent cells. To increase the scale of viral particle production by adherent viral replication cells, larger cell culture surfaces are required. In some cases, large-scale production methods comprise the use of roller bottles to increase cell culture surfaces. Other cell culture substrates with increased surface areas are known in the art. Examples of additional adherent cell culture products with increased surface areas include, but are not limited to CELLSTACK®, CELLCUBE® (Corning Corp., Corning, N.Y.) and NUNC™ CELL FACTORY™ (Thermo Scientific, Waltham, Mass.) In some cases, large-scale adherent cell surfaces may comprise from about 1,000 cm² to about 100,000 cm². In some cases, large-scale adherent cell cultures may comprise from about 10⁷ to about 10⁹ cells, from about 10⁸ to about 10¹⁰ cells, from about 10⁹ to about 10¹² cells or at least 10¹² cells. In some cases, large-scale adherent cultures may produce from about 10⁹ to about 10¹², from about 10¹⁰ to about 10¹³ from about 10¹¹ to about 10¹⁴, from about 10¹² to about 10¹⁵ or at least 10¹⁹ viral particles.

[0605] In some embodiments, large-scale viral production methods of the present disclosure may comprise the use of suspension cell cultures. Suspension cell culture allows for significantly increased numbers of cells. Typically, the number of adherent cells that can be grown on about 10-50 cm² of surface area can be grown in about 1 cm³ volume in suspension.

[0606] Transfection of replication cells in large-scale culture formats may be carried out according to any methods known in the art. For large-scale adherent cell cultures, transfection methods may include, but are not limited to the use of inorganic compounds (e.g. calcium phosphate), organic compounds [e.g. polyethyleneimine (PEI)] or the use of non-chemical methods (e.g. electroporation.) With cells grown in suspension, transfection methods may include, but are not limited to the use of calcium phosphate and the use of PEI. In some cases, transfection of large scale suspension cultures may be carried out according to the section entitled “Transfection Procedure” described in Feng, L. et al., 2008. Biotechnol Appl. Biochem. 50:121-32, the contents of which are herein incorporated by reference in their entirety. According to such embodiments, PEI-DNA complexes may be formed for introduction of plasmids to be transfected. In some cases, cells being transfected with PEI-DNA complexes may be ‘shocked’ prior to transfection. This comprises lowering cell culture temperatures to 4° C. for a period of about 1 hour. In some cases, cell cultures may be shocked for a period of from about 10 minutes to about 5 hours. In some cases, cell cultures may be shocked at a temperature of from about 0° C. to about 20° C.

[0607] In some cases, transfections may include one or more vectors for expression of an RNA effector molecule to reduce expression of nucleic acids from one or more AAV payload construct. Such methods may enhance the production of viral particles by reducing cellular resources wasted on expressing payload constructs. In some cases, such methods may be carried according to those taught in US Publication No. US2014/0099666, the contents of which are herein incorporated by reference in their entirety.

### Bioreactors

[0608] In some embodiments, cell culture bioreactors may be used for large scale viral production. In some cases, bioreactors comprise stirred tank reactors. Such reactors generally comprise a vessel, typically cylindrical in shape, with a stirrer (e.g. impeller.) In some embodiments, such bioreactor vessels may be placed within a water jacket to control vessel temperature and/or to minimize effects from ambient temperature changes. Bioreactor vessel volume may range in size from about 500 ml to about 2 L, from about 1 L to about 5 L, from about 2.5 L to about 20 L, from about 10 L to about 50 L, from about 25 L to about 100 L, from about 75 L to about 500 L, from about 250 L to about 2,000 L, from about 1,000 L to about 10,000 L, from about 5,000 L to about 50,000 L or at least 50,000 L. Vessel bottoms may be rounded or flat. In some cases, animal cell cultures may be maintained in bioreactors with rounded vessel bottoms.

[0609] In some cases, bioreactor vessels may be warmed through the use of a thermocirculator. Thermocirculators pump heated water around water jackets. In some cases, heated water may be pumped through pipes (e.g. coiled pipes) that are present within bioreactor vessels. In some cases, warm air may be circulated around bioreactors, including, but not limited to air space directly above culture medium. Additionally, pH and CO₂ levels may be maintained to optimize cell viability.

[0610] In some cases, bioreactors may comprise hollow-fiber reactors. Hollow-fiber bioreactors may support the culture of both anchorage dependent and anchorage independent cells. Further bioreactors may include, but are not limited to packed-bed or fixed-bed bioreactors. Such bioreactors may comprise vessels with glass beads for adherent cell attachment. Further packed-bed reactors may comprise ceramic beads.

[0611] In some cases, viral particles are produced through the use of a disposable bioreactor. In some embodiments, such bioreactors may include WAVE™ disposable bioreactors.

[0612] In some embodiments, AAV particle production in animal cell bioreactor cultures may be carried out according to the methods taught in U.S. Pat. Nos. 5,064,764, 6,194,191, 6,566,118, 8,137,948 or US Patent Application No. US2011/0229971, the contents of each of which are herein incorporated by reference in their entirety.

### Cell Lysis

[0613] Cells of the invention, including, but not limited to viral production cells, may be subjected to cell lysis according to any methods known in the art. Cell lysis may be carried out to obtain one or more agents (e.g. viral particles) present within any cells of the invention. In some embodiments, cell lysis may be carried out according to any of the methods listed in U.S. Pat. Nos. 7,326,555, 7,579,181, 7,048,920, 6,410,300, 6,436,394, 7,732,129, 7,510,875, 7,445,930, 6,726,907, 6,194,191, 7,125,706, 6,995,006, 6,676,935, 7,968,333, 5,756,283, 6,258,595, 6,261,551, 6,270,996, 6,281,010, 6,365,394, 6,475,769, 6,482,634, 6,485,966, 6,943,019, 6,953,690, 7,022,519, 7,238,526, 7,291,498 and 7,491,508 or International Publication Nos. WO 1996039530, WO 1998010088, WO 1999014354, WO 1999015685, WO 1999047691. WO2000055342, WO2000075353 and WO2001023597, the contents of each of which are herein incorporated by reference in their entirety. Cell lysis methods may be chemical or mechanical. Chemical cell lysis typically comprises contacting one or more cells with one or more lysis agent. Mechanical lysis typically comprises subjecting one or more cells to one or more lysis condition and/or one or more lysis force.

[0614] In some embodiments, chemical lysis may be used to lyse cells. As used herein, the term “lysis agent” refers to any agent that may aid in the disruption of a cell. In some cases, lysis agents are introduced in solutions, termed lysis solutions or lysis buffers. As used herein, the term “lysis solution” refers to a solution (typically aqueous) comprising one or more lysis agent. In addition to lysis agents, lysis solutions may include one or more buffering agents, solubilizing agents, surfactants, preservatives, cryoprotectants, enzymes, enzyme inhibitors and/or chelators. Lysis buffers are lysis solutions comprising one or more buffering agent. Additional components of lysis solutions may include one or more solubilizing agent. As used herein, the term “solubilizing agent” refers to a compound that enhances the solubility of one or more components of a solution and/or the solubility of one or more entities to which solutions are applied. In some cases, solubilizing agents enhance protein solubility. In some cases, solubilizing agents are selected based on their ability to enhance protein solubility while maintaining protein conformation and/or activity.

[0615] Exemplary lysis agents may include any of those described in U.S. Pat. Nos. 8,685,734, 7,901,921, 7,732,129, 7,223,585, 7,125,706, 8,236,495, 8,110,351, 7,419,956, 7,300,797, 6,699,706 and 6,143,567, the contents of each of which are herein incorporated by reference in their entirety. In some cases, lysis agents may be selected from lysis salts, amphoteric agents, cationic agents, ionic detergents and non-ionic detergents. Lysis salts may include, but are not limited to sodium chloride (NaCl) and potassium chloride (KCl.) Further lysis salts may include any of those described in U.S. Pat. Nos. 8,614,101, 7,326,555, 7,579,181, 7,048,920, 6,410,300, 6,436,394, 7,732,129, 7,510,875, 7,445,930, 6,726,907, 6,194,191, 7,125,706, 6,995,006, 6,676,935 and 7,968,333, the contents of each of which are herein incorporated by reference in their entirety. Concentrations of salts may be increased or decreased to obtain an effective concentration for rupture of cell membranes. Amphoteric agents, as referred to herein, are compounds capable of reacting as an acid or a base. Amphoteric agents may include, but are not limited to lysophosphatidylcholine, 3-((3-Cholamidopropyl) dimethylammonium)-1-propanesulfonate (CHAPS), ZWITTERGENT® and the like. Cationic agents may include, but are not limited to cetyltrimethylammonium bromide (C (16) TAB) and Benzalkonium chloride. Lysis agents comprising detergents may include ionic detergents or non-ionic detergents. Detergents may function to break apart or dissolve cell structures including, but not limited to cell membranes, cell walls, lipids, carbohydrates, lipoproteins and glycoproteins. Exemplary ionic detergents include any of those taught in U.S. Pat. Nos. 7,625,570 and 6,593,123 or US Publication No. US2014/0087361, the contents of each of which are herein incorporated by reference in their entirety. Some ionic detergents may include, but are not limited to sodium dodecyl sulfate (SDS), cholate and dcoxycholate. In some cases, ionic detergents may be included in lysis solutions as a solubilizing agent. Non-ionic detergents may include, but are not limited to octylglucoside, digitonin, lubrol, C12E8, TWEEN®-20, TWEEN®-80, Triton X-100 and Noniodet P-40. Non-ionic detergents are typically weaker lysis agents, but may be included as solubilizing agents for solubilizing cellular and/or viral proteins. Further lysis agents may include enzymes and urea. In some cases, one or more lysis agents may be combined in a lysis solution in order to enhance one or more of cell lysis and protein solubility. In some cases, enzyme inhibitors may be included in lysis solutions in order to prevent proteolysis that may be triggered by cell membrane disruption.

[0616] In some embodiments, mechanical cell lysis is carried out. Mechanical cell lysis methods may include the use of one or more lysis condition and/or one or more lysis force. As used herein, the term “lysis condition” refers to a state or circumstance that promotes cellular disruption. Lysis conditions may comprise certain temperatures, pressures, osmotic purity, salinity and the like. In some cases, lysis conditions comprise increased or decreased temperatures. According to some embodiments, lysis conditions comprise changes in temperature to promote cellular disruption. Cell lysis carried out according to such embodiments may include freeze-thaw lysis. As used herein, the term “freeze-thaw lysis” refers to cellular lysis in which a cell solution is subjected to one or more freeze-thaw cycle. According to freeze-thaw lysis methods, cells in solution are frozen to induce a mechanical disruption of cellular membranes caused by the formation and expansion of ice crystals. Cell solutions used according freeze-thaw lysis methods, may further comprise one or more lysis agents, solubilizing agents, buffering agents, cryoprotectants, surfactants, preservatives, enzymes, enzyme inhibitors and/or chelators. Once cell solutions subjected to freezing are thawed, such components may enhance the recovery of desired cellular products. In some cases, one or more cryoprotectants are included in cell solutions undergoing freeze-thaw lysis. As used herein, the term “cryoprotectant” refers to an agent used to protect one or more substance from damage due to freezing. Cryoprotectants may include any of those taught in US Publication No. US2013/0323302 or U.S. Pat. Nos. 6,503,888, 6,180,613, 7,888,096, 7,091,030, the contents of each of which are herein incorporated by reference in their entirety. In some cases, cryoprotectants may include, but are not limited to dimethyl sulfoxide, 1,2-propanediol, 2,3-butanediol, formamide, glycerol, ethylene glycol, 1,3-propanediol and n-dimethyl formamide, polyvinylpyrrolidone, hydroxyethyl starch, agarose, dextrans, inositol, glucose, hydroxyethylstarch, lactose, sorbitol, methyl glucose, sucrose and urea. In some embodiments, freeze-thaw lysis may be carried out according to any of the methods described in U.S. Pat. No. 7,704,721, the contents of which are herein incorporated by reference in their entirety.

[0617] As used herein, the term “lysis force” refers to a physical activity used to disrupt a cell. Lysis forces may include, but are not limited to mechanical forces, sonic forces, gravitational forces, optical forces, electrical forces and the like. Cell lysis carried out by mechanical force is referred to herein as “mechanical lysis.” Mechanical forces that may be used according to mechanical lysis may include high shear fluid forces. According to such methods of mechanical lysis, a microfluidizer may be used. Microfluidizers typically comprise an inlet reservoir where cell solutions may be applied. Cell solutions may then be pumped into an interaction chamber via a pump (e.g. high-pressure pump) at high speed and/or pressure to produce shear fluid forces. Resulting lysates may then be collected in one or more output reservoir. Pump speed and/or pressure may be adjusted to modulate cell lysis and enhance recovery of products (e.g. viral particles.) Other mechanical lysis methods may include physical disruption of cells by scraping.

[0618] Cell lysis methods may be selected based on the cell culture format of cells to be lysed. For example, with adherent cell cultures, some chemical and mechanical lysis methods may be used. Such mechanical lysis methods may include freeze-thaw lysis or scraping. In another example, chemical lysis of adherent cell cultures may be carried out through incubation with lysis solutions comprising surfactant, such as Triton-X-100. In some cases, cell lysates generated from adherent cell cultures may be treated with one more nuclease to lower the viscosity of the lysates caused by liberated DNA.

[0619] In one embodiment, a method for harvesting AAV particles without lysis may be used for efficient and scalable AAV particle production. In a non-limiting example, AAV particles may be produced by culturing an AAV particle lacking a heparin binding site, thereby allowing the AAV particle to pass into the supernatant, in a cell culture, collecting supernatant from the culture: and isolating the AAV particle from the supernatant, as described in US Patent Application 20090275107, the contents of which are incorporated herein by reference in their entirety.

### Clarification

[0620] Cell lysates comprising viral particles may be subjected to clarification. Clarification refers to initial steps taken in purification of viral particles from cell lysates. Clarification serves to prepare lysates for further purification by removing larger, insoluble debris. Clarification steps may include, but are not limited to centrifugation and filtration. During clarification, centrifugation may be carried out at low speeds to remove larger debris only. Similarly, filtration may be carried out using filters with larger pore sizes so that only larger debris is removed. In some cases, tangential flow filtration may be used during clarification. Objectives of viral clarification include high throughput processing of cell lysates and to optimize ultimate viral recovery. Advantages of including a clarification step include scalability for processing of larger volumes of lysate. In some embodiments, clarification may be carried out according to any of the methods presented in U.S. Pat. Nos. 8,524,446, 5,756,283, 6,258,595, 6,261,551, 6,270,996, 6,281,010, 6,365,394, 6,475,769, 6,482,634, 6,485,966, 6,943,019, 6,953,690, 7,022,519, 7,238,526, 7,291,498, 7,491,508, US Publication Nos. US2013/0045186, US2011/0263027. US2011/0151434, US2003/0138772, and International Publication Nos. WO2002012455, WO 1996039530, WO 1998010088, WO 1999014354, WO 1999015685, WO 1999047691, WO2000055342, WO02000075353 and WO02001023597, the contents of each of which are herein incorporated by reference in their entirety.

[0621] Methods of cell lysate clarification by filtration are well understood in the art and may be carried out according to a variety of available methods including, but not limited to passive filtration and flow filtration. Filters used may comprise a variety of materials and pore sizes. For example, cell lysate filters may comprise pore sizes of from about 1 μM to about 5 μM, from about 0.5 μM to about 2 μM, from about 0.1 μM to about 1 μM, from about 0.05 μM to about 0.05 μM and from about 0.001 μM to about 0.1 μM. Exemplary pore sizes for cell lysate filters may include, but are not limited to, 2.0, 1.9, 1.8, 1.7, 1.6, 1.5, 1.4, 1.3, 1.2, 1.1, 1, 0.9, 0.8, 0.7, 0.6, 0.5, 0.4, 0.3, 0.2, 0.1, 0.95, 0.9, 0.85, 0.8, 0.75, 0.7, 0.65, 0.6, 0.55, 0.5, 0.45, 0.4, 0.35, 0.3, 0.25, 0.2, 0.15, 0.1, 0.05, 0.22, 0.21, 0.20, 0.19, 0.18, 0.17, 0.16, 0.15, 0.14, 0.13, 0.12, 0.11, 0.1, 0.09, 0.08, 0.07, 0.06, 0.05, 0.04, 0.03, 0.02, 0.01, 0.02, 0.019, 0.018, 0.017, 0.016, 0.015, 0.014, 0.013, 0.012, 0.011, 0.01, 0.009, 0.008, 0.007, 0.006, 0.005, 0.004, 0.003, 0.002, 0.001 and 0.001 μM. In one embodiment, clarification may comprise filtration through a filter with 2.0 μM pore size to remove large debris, followed by passage through a filter with 0.45 μM pore size to remove intact cells.

[0622] Filter materials may be composed of a variety of materials. Such materials may include, but are not limited to polymeric materials and metal materials (e.g. sintered metal and pored aluminum.) Exemplary materials may include, but are not limited to nylon, cellulose materials (e.g. cellulose acetate), polyvinylidene fluoride (PVDF), polyethersulfone, polyamide, polysulfone, polypropylene, and polyethylene terephthalate. In some cases, filters useful for clarification of cell lysates may include, but are not limited to ULTIPLEAT PROFILE™ filters (Pall Corporation, Port Washington, N.Y.), SUPOR™ membrane filters (Pall Corporation, Port Washington, N.Y.)

[0623] In some cases, flow filtration may be carried out to increase filtration speed and/or effectiveness. In some cases, flow filtration may comprise vacuum filtration. According to such methods, a vacuum is created on the side of the filter opposite that of cell lysate to be filtered. In some cases, cell lysates may be passed through filters by centrifugal forces. In some cases, a pump is used to force cell lysate through clarification filters. Flow rate of cell lysate through one or more filters may be modulated by adjusting one of channel size and/or fluid pressure.

[0624] According to some embodiments, cell lysates may be clarified by centrifugation. Centrifugation may be used to pellet insoluble particles in the lysate. During clarification, centrifugation strength [expressed in terms of gravitational units (g), which represents multiples of standard gravitational force] may be lower than in subsequent purification steps. In some cases, centrifugation may be carried out on cell lysates at from about 200 g to about 800 g, from about 500 g to about 1500 g, from about 1000 g to about 5000 g, from about 1200 g to about 10000 g or from about 8000 g to about 15000 g. In some embodiments, cell lysate centrifugation is carried out at 8000 g for 15 minutes. In some cases, density gradient centrifugation may be carried out in order to partition particulates in the cell lysate by sedimentation rate. Gradients used according to methods of the present disclosure may include, but are not limited to cesium chloride gradients and iodixanol step gradients.

### Purification: Chromatography

[0625] In some cases. AAV particles may be purified from clarified cell lysates by one or more methods of chromatography. Chromatography refers to any number of methods known in the art for separating out one or more elements from a mixture. Such methods may include, but are not limited to ion exchange chromatography (e.g. cation exchange chromatography and anion exchange chromatography), immunoaffinity chromatography and size-exclusion chromatography. In some embodiments, methods of viral chromatography may include any of those taught in U.S. Pat. Nos. 5,756,283, 6,258,595, 6,261,551, 6,270,996, 6,281,010, 6,365,394, 6,475,769, 6,482,634, 6,485,966, 6,943,019, 6,953,690, 7,022,519, 7,238,526, 7,291,498 and 7,491,508 or International Publication Nos. WO1996039530, WO 1998010088, WO 1999014354, WO 1999015685, WO 1999047691, WO2000055342, WO2000075353 and WO2001023597, the contents of each of which are herein incorporated by reference in their entirety.

[0626] In some embodiments, ion exchange chromatography may be used to isolate viral particles. Ion exchange chromatography is used to bind viral particles based on charge-charge interactions between capsid proteins and charged sites present on a stationary phase, typically a column through which viral preparations (e.g. clarified lysates) are passed. After application of viral preparations, bound viral particles may then be eluted by applying an elution solution to disrupt the charge-charge interactions. Elution solutions may be optimized by adjusting salt concentration and/or pH to enhance recovery of bound viral particles. Depending on the charge of viral capsids being isolated, cation or anion exchange chromatography methods may be selected. Methods of ion exchange chromatography may include, but are not limited to any of those taught in U.S. Pat. Nos. 7,419,817, 6,143,548, 7,094,604, 6,593,123, 7,015,026 and 8,137,948, the contents of each of which are herein incorporated by reference in their entirety.

[0627] In some embodiments, immunoaffinity chromatography may be used. Immunoaffinity chromatography is a form of chromatography that utilizes one or more immune compounds (e.g. antibodies or antibody-related structures) to retain viral particles. Immune compounds may bind specifically to one or more structures on viral particle surfaces, including, but not limited to one or more viral coat protein. In some cases, immune compounds may be specific for a particular viral variant. In some cases, immune compounds may bind to multiple viral variants. In some embodiments, immune compounds may include recombinant single-chain antibodies. Such recombinant single chain antibodies may include those described in Smith, R. H. et al., 2009. Mol. Ther. 17(11): 1888-96, the contents of which are herein incorporated by reference in their entirety. Such immune compounds are capable of binding to several AAV capsid variants, including, but not limited to AAV1, AAV2, AAV6 and AAV8.

[0628] In some embodiments, size-exclusion chromatography (SEC) may be used. SEC may comprise the use of a gel to separate particles according to size. In viral particle purification, SEC filtration is sometimes referred to as “polishing.” In some cases, SEC may be carried out to generate a final product that is near-homogenous. Such final products may in some cases be used in pre-clinical studies and/or clinical studies (Kotin, R. M. 2011. Human Molecular Genetics. 20(1):R2-R6, the contents of which are herein incorporated by reference in their entirety.) In some cases, SEC may be carried out according to any of the methods taught in U.S. Pat. Nos. 6,143,548, 7,015,026, 8,476,418, 6,410,300, 8,476,418, 7,419,817, 7,094,604, 6,593,123, and 8,137,948, the contents of each of which are herein incorporated by reference in their entirety.

[0629] In one embodiment, the compositions comprising at least one AAV particle may be isolated or purified using the methods described in U.S. Pat. No. 6,146,874, the contents of which are herein incorporated by reference in its entirety.

[0630] In one embodiment, the compositions comprising at least one AAV particle may be isolated or purified using the methods described in U.S. Pat. No. 6,660,514, the contents of which are herein incorporated by reference in its entirety.

[0631] In one embodiment, the compositions comprising at least one AAV particle may be isolated or purified using the methods described in U.S. Pat. No. 8,283,151, the contents of which are herein incorporated by reference in its entirety.

[0632] In one embodiment, the compositions comprising at least one AAV particle may be isolated or purified using the methods described in U.S. Pat. No. 8,524,446, the contents of which are herein incorporated by reference in its entirety.

### II. Formulation and Delivery

### Pharmaceutical Compositions and Formulation

[0633] In addition to the pharmaceutical compositions (AAV particles comprising a modulatory polynucleotide sequence encoding the siRNA molecules), provided herein are pharmaceutical compositions which are suitable for administration to humans, it will be understood by the skilled artisan that such compositions are generally suitable for administration to any other animal, e.g., to non-human animals, e.g. non-human mammals. Modification of pharmaceutical compositions suitable for administration to humans in order to render the compositions suitable for administration to various animals is well understood, and the ordinarily skilled veterinary pharmacologist can design and/or perform such modification with merely ordinary, if any, experimentation. Subjects to which administration of the pharmaceutical compositions is contemplated include, but are not limited to, humans and/or other primates; mammals, including commercially relevant mammals such as cattle, pigs, horses, sheep, cats, dogs, mice, and/or rats; and/or birds, including commercially relevant birds such as poultry, chickens, ducks, geese, and/or turkeys.

[0634] In some embodiments, compositions are administered to humans, human patients or subjects. For the purposes of the present disclosure, the phrase “active ingredient” generally refers either to the synthetic siRNA duplexes, the modulatory polynucleotide encoding the siRNA duplex, or the AAV particle comprising a modulatory polynucleotide encoding the siRNA duplex described herein.

[0635] Formulations of the pharmaceutical compositions described herein may be prepared by any method known or hereafter developed in the art of pharmacology. In general, such preparatory methods include the step of bringing the active ingredient into association with an excipient and/or one or more other accessory ingredients, and then, if necessary and/or desirable, dividing, shaping and/or packaging the product into a desired single- or multi-dose unit.

[0636] Relative amounts of the active ingredient, the pharmaceutically acceptable excipient, and/or any additional ingredients in a pharmaceutical composition in accordance with the invention will vary, depending upon the identity, size, and/or condition of the subject treated and further depending upon the route by which the composition is to be administered.

[0637] The AAV particles comprising the modulatory polynucleotide sequence encoding the siRNA molecules of the present invention can be formulated using one or more excipients to: (1) increase stability; (2) increase cell transfection or transduction; (3) permit the sustained or delayed release; or (4) alter the biodistribution (e.g., target the AAV particle to specific tissues or cell types such as brain and neurons).

[0638] Formulations of the present invention can include, without limitation, saline, lipidoids, liposomes, lipid nanoparticles, polymers, lipoplexes, core-shell nanoparticles, peptides, proteins, cells transfected with AAV particles (e.g., for transplantation into a subject), nanoparticle mimics and combinations thereof. Further, the AAV particles of the present invention may be formulated using self-assembled nucleic acid nanoparticles.

[0639] Formulations of the pharmaceutical compositions described herein may be prepared by any method known or hereafter developed in the art of pharmacology. In general, such preparatory methods include the step of associating the active ingredient with an excipient and/or one or more other accessory ingredients.

[0640] A pharmaceutical composition in accordance with the present disclosure may be prepared, packaged, and/or sold in bulk, as a single unit dose, and/or as a plurality of single unit doses. As used herein, a “unit dose” refers to a discrete amount of the pharmaceutical composition comprising a predetermined amount of the active ingredient. The amount of the active ingredient is generally equal to the dosage of the active ingredient which would be administered to a subject and/or a convenient fraction of such a dosage such as, for example, one-half or one-third of such a dosage.

[0641] Relative amounts of the active ingredient, the pharmaceutically acceptable excipient, and/or any additional ingredients in a pharmaceutical composition in accordance with the present disclosure may vary, depending upon the identity, size, and/or condition of the subject being treated and further depending upon the route by which the composition is to be administered. For example, the composition may comprise between 0.1% and 99% (w/w) of the active ingredient. By way of example, the composition may comprise between 0.1% and 100%, e.g., between 0.5 and 50%, between 1-30%, between 5-80%, at least 80% (w/w) active ingredient.

[0642] In some embodiments, a pharmaceutically acceptable excipient may be at least 95%, at least 96%, at least 97%, at least 98%, at least 99%, or 100% pure. In some embodiments, an excipient is approved for use for humans and for veterinary use. In some embodiments, an excipient may be approved by United States Food and Drug Administration. In some embodiments, an excipient may be of pharmaceutical grade. In some embodiments, an excipient may meet the standards of the United States Pharmacopoeia (USP), the European Pharmacopoeia (EP), the British Pharmacopoeia, and/or the International Pharmacopoeia.

[0643] Excipients, which, as used herein, includes, but is not limited to, any and all solvents, dispersion media, diluents, or other liquid vehicles, dispersion or suspension aids, surface active agents, isotonic agents, thickening or emulsifying agents, preservatives, and the like, as suited to the particular dosage form desired. Various excipients for formulating pharmaceutical compositions and techniques for preparing the composition are known in the art (see Remington: The Science and Practice of Pharmacy, 21^{st} Edition, A. R. Gennaro, Lippincott, Williams & Wilkins, Baltimore, Md., 2006; incorporated herein by reference in its entirety). The use of a conventional excipient medium may be contemplated within the scope of the present disclosure, except insofar as any conventional excipient medium may be incompatible with a substance or its derivatives, such as by producing any undesirable biological effect or otherwise interacting in a deleterious manner with any other component(s) of the pharmaceutical composition.

[0644] Exemplary diluents include, but are not limited to, calcium carbonate, sodium carbonate, calcium phosphate, dicalcium phosphate, calcium sulfate, calcium hydrogen phosphate, sodium phosphate lactose, sucrose, cellulose, microcrystalline cellulose, kaolin, mannitol, sorbitol, inositol, sodium chloride, dry starch, cornstarch, powdered sugar, etc., and/or combinations thereof.

[0645] In some embodiments, the formulations may comprise at least one inactive ingredient. As used herein, the term “inactive ingredient” refers to one or more inactive agents included in formulations. In some embodiments, all, none or some of the inactive ingredients which may be used in the formulations of the present invention may be approved by the US Food and Drug Administration (FDA).

[0646] Formulations of vectors comprising the nucleic acid sequence for the siRNA molecules of the present invention may include cations or anions. In one embodiment, the formulations include metal cations such as, but not limited to, Zn2+, Ca2+, Cu2+, Mg+ and combinations thereof.

[0647] As used herein, “pharmaceutically acceptable salts” refers to derivatives of the disclosed compounds wherein the parent compound is modified by converting an existing acid or base moiety to its salt form (e.g., by reacting the free base group with a suitable organic acid). Examples of pharmaceutically acceptable salts include, but are not limited to, mineral or organic acid salts of basic residues such as amines; alkali or organic salts of acidic residues such as carboxylic acids; and the like. Representative acid addition salts include acetate, acetic acid, adipate, alginate, ascorbate, aspartate, benzenesulfonate, benzene sulfonic acid, benzoate, bisulfate, borate, butyrate, camphorate, camphorsulfonate, citrate, cyclopentanepropionate, digluconate, dodecylsulfate, ethanesulfonate, fumarate, glucoheptonate, glycerophosphate, hemisulfate, heptonate, hexanoate, hydrobromide, hydrochloride, hydroiodide, 2-hydroxy-ethanesulfonate, lactobionate, lactate, laurate, lauryl sulfate, malate, maleate, malonate, methanesulfonate, 2-naphthalenesulfonate, nicotinate, nitrate, oleate, oxalate, palmitate, pamoate, pectinate, persulfate, 3-phenylpropionate, phosphate, picrate, pivalate, propionate, stearate, succinate, sulfate, tartrate, thiocyanate, toluenesulfonate, undecanoate, valerate salts, and the like. Representative alkali or alkaline earth metal salts include sodium, lithium, potassium, calcium, magnesium, and the like, as well as nontoxic ammonium, quaternary ammonium, and amine cations, including, but not limited to ammonium, tetramethylammonium, tetraethylammonium, methylamine, dimethylamine, trimethylamine, triethylamine, ethylamine, and the like. The pharmaceutically acceptable salts of the present disclosure include the conventional non-toxic salts of the parent compound formed, for example, from non-toxic inorganic or organic acids. The pharmaceutically acceptable salts of the present disclosure can be synthesized from the parent compound which contains a basic or acidic moiety by conventional chemical methods. Generally, such salts can be prepared by reacting the free acid or base forms of these compounds with a stoichiometric amount of the appropriate base or acid in water or in an organic solvent, or in a mixture of the two: generally, nonaqueous media like ether, ethyl acetate, ethanol, isopropanol, or acetonitrile are preferred. Lists of suitable salts are found in Remington's Pharmaceutical Sciences, 17^{th} ed., Mack Publishing Company, Easton, Pa., 1985, p. 1418, Pharmaceutical Salts: Properties, Selection, and Use, P. H. Stahl and C. G. Wermuth (eds.), Wiley-VCH, 2008, and Berge et al., Journal of Pharmaceutical Science, 66, 1-19 (1977); the content of each of which is incorporated herein by reference in their entirety.

[0648] The term “pharmaceutically acceptable solvate,” as used herein, means a compound of the invention wherein molecules of a suitable solvent are incorporated in the crystal lattice. A suitable solvent is physiologically tolerable at the dosage administered. For example, solvates may be prepared by crystallization, recrystallization, or precipitation from a solution that includes organic solvents, water, or a mixture thereof. Examples of suitable solvents are ethanol, water (for example, mono-, di-, and tri-hydrates), N-methylpyrrolidinone (NMP), dimethyl sulfoxide (DMSO), N,N′-dimethylformamide (DMF), N,N′-dimethylacetamide (DMAC), 1,3-dimethyl-2-imidazolidinone (DMEU), 1,3-dimethyl-3,4,5,6-tetrahydro-2-(1H)-pyrimidinone (DMPU), acetonitrile (ACN), propylene glycol, ethyl acetate, benzyl alcohol, 2-pyrrolidone, benzyl benzoate, and the like. When water is the solvent, the solvate is referred to as a “hydrate.”

[0649] According to the present invention, the AAV particle comprising the modulatory polynucleotide sequence encoding for the siRNA molecules may be formulated for CNS delivery. Agents that cross the brain blood barrier may be used. For example, some cell penetrating peptides that can target siRNA molecules to the brain blood barrier endothelium may be used to formulate the siRNA duplexes targeting the gene of interest.

### Inactive Ingredients

[0650] In some embodiments, formulations may comprise at least one excipient which is an inactive ingredient. As used herein, the term “inactive ingredient” refers to one or more inactive agents included in formulations. In some embodiments, all, none or some of the inactive ingredients which may be used in the formulations of the present disclosure may be approved by the US Food and Drug Administration (FDA).

[0651] Formulations of AAV particles described herein may include cations or anions. In one embodiment, the formulations include metal cations such as, but not limited to, Zn2+, Ca2+, Cu2+, Mg+ and combinations thereof. As a non-limiting example, formulations may include polymers and compositions described herein complexed with a metal cation (See e.g., U.S. Pat. Nos. 6,265,389 and 6,555,525, each of which is herein incorporated by reference in its entirety).

### Delivery

[0652] In one embodiment, the AAV particles described herein may be administered or delivered using the methods for the delivery of AAV virions described in European Patent Application No. EP1857552, the contents of which are herein incorporated by reference in its entirety.

[0653] In one embodiment, the AAV particles described herein may be administered or delivered using the methods for delivering proteins using AAV particles described in European Patent Application No. EP2678433, the contents of which are herein incorporated by reference in its entirety.

[0654] In one embodiment, the AAV particle described herein may be administered or delivered using the methods for delivering DNA molecules using AAV particles described in U.S. Pat. No. 5,858,351, the contents of which are herein incorporated by reference in its entirety.

[0655] In one embodiment, the AAV particle described herein may be administered or delivered using the methods for delivering DNA to the bloodstream described in U.S. Pat. No. 6,211,163, the contents of which are herein incorporated by reference in its entirety.

[0656] In one embodiment, the AAV particle described herein may be administered or delivered using the methods for delivering AAV virions described in U.S. Pat. No. 6,325,998, the contents of which are herein incorporated by reference in its entirety.

[0657] In one embodiment, the AAV particle described herein may be administered or delivered using the methods for delivering a payload to the central nervous system described in U.S. Pat. No. 7,588,757, the contents of which are herein incorporated by reference in its entirety.

[0658] In one embodiment, the AAV particle described herein may be administered or delivered using the methods for delivering a payload described in U.S. Pat. No. 8,283,151, the contents of which are herein incorporated by reference in its entirety.

[0659] In one embodiment, the AAV particle described herein may be administered or delivered using the methods for delivering a payload using a glutamic acid decarboxylase (GAD) delivery vector described in International Patent Publication No. WO2001089583, the contents of which are herein incorporated by reference in its entirety.

[0660] In one embodiment, the AAV particle described herein may be administered or delivered using the methods for delivering a payload to neural cells described in International Patent Publication No. WO2012057363, the contents of which are herein incorporated by reference in its entirety.

### Delivery to Cells

[0661] The present disclosure provides a method of delivering to a cell or tissue any of the above-described AAV polynucleotides or AAV genomes, comprising contacting the cell or tissue with said AAV polynucleotide or AAV genomes or contacting the cell or tissue with a particle comprising said AAV polynucleotide or AAV genome, or contacting the cell or tissue with any of the described compositions, including pharmaceutical compositions. The method of delivering the AAV polynucleotide or AAV genome to a cell or tissue can be accomplished in vitro, ex vivo, or in vivo.

Introduction into Cells—Synthetic dsRNA

[0662] To ensure the chemical and biological stability of siRNA molecules (e.g., siRNA duplexes and dsRNA), it is important to deliver siRNA molecules inside the target cells. In some embodiments, the cells may include, but are not limited to, cells of mammalian origin, cells of human origins, embryonic stem cells, induced pluripotent stem cells, neural stem cells, and neural progenitor cells.

[0663] Nucleic acids, including siRNA, carry a net negative charge on the sugar-phosphate backbone under normal physiological conditions. In order to enter the cell, a siRNA molecule must come into contact with a lipid bilayer of the cell membrane, whose head groups are also negatively charged.

[0664] The siRNA duplexes can be complexed with a carrier that allows them to traverse cell membranes such as package particles to facilitate cellular uptake of the siRNA. The package particles may include, but are not limited to, liposomes, nanoparticles, cationic lipids, polyethylenimine derivatives, dendrimers, carbon nanotubes and the combination of carbon-made nanoparticles with dendrimers. Lipids may be cationic lipids and/or neutral lipids. In addition to well established lipophilic complexes between siRNA molecules and cationic carriers, siRNA molecules can be conjugated to a hydrophobic moiety, such as cholesterol (e.g., U.S. Patent Publication No. 20110110937; the content of which is herein incorporated by reference in its entirety). This delivery method holds a potential of improving in vitro cellular uptake and in vivo pharmacological properties of siRNA molecules. The siRNA molecules of the present invention may also be conjugated to certain cationic cell-penetrating peptides (CPPs), such as MPG, transportan or penetratin covalently or non-covalently (e.g., U.S. Patent Publication No. 20110086425; the content of which is herein incorporated by reference in its entirety).

Introduction into Cells-AAV Particles

[0665] The siRNA molecules (e.g., siRNA duplexes) of the present invention may be introduced into cells using any of a variety of approaches such as, but not limited to, AAV particles. These AAV particles are engineered and optimized to facilitate the entry of siRNA molecule into cells that are not readily amendable to transfection. Also, some synthetic AAV particles possess an ability to integrate the shRNA into the cell genome, thereby leading to stable siRNA expression and long-term knockdown of a target gene. In this manner, AAV particles are engineered as vehicles for specific delivery while lacking the deleterious replication and/or integration features found in wild-type virus.

[0666] In some embodiments, the siRNA molecules of the present invention are introduced into a cell by contacting the cell with an AAV particle comprising a modulatory polynucleotide sequence encoding a siRNA molecule, and a lipophilic carrier. In other embodiments, the siRNA molecule is introduced into a cell by transfecting or infecting the cell with an AAV particle comprising a nucleic acid sequence capable of producing the siRNA molecule when transcribed in the cell. In some embodiments, the siRNA molecule is introduced into a cell by injecting into the cell an AAV particle comprising a nucleic acid sequence capable of producing the siRNA molecule when transcribed in the cell.

[0667] In some embodiments, prior to transfection, an AAV particle comprising a nucleic acid sequence encoding the siRNA molecules of the present invention may be transfected into cells.

[0668] In other embodiments, the AAV particles comprising the nucleic acid sequence encoding the siRNA molecules of the present invention may be delivered into cells by electroporation (e.g. U.S. Patent Publication No. 20050014264; the content of which is herein incorporated by reference in its entirety).

[0669] Other methods for introducing AAV particles comprising the nucleic acid sequence encoding the siRNA molecules described herein may include photochemical internalization as described in U. S. Patent publication No. 20120264807; the content of which is herein incorporated by reference in its entirety.

[0670] In some embodiments, the formulations described herein may contain at least one AAV particle comprising the nucleic acid sequence encoding the siRNA molecules described herein. In one embodiment, the siRNA molecules may target the gene of interest at one target site. In another embodiment, the formulation comprises a plurality of AAV particles, each AAV particle comprising a nucleic acid sequence encoding a siRNA molecule targeting the gene of interest at a different target site. The gene of interest may be targeted at 2, 3, 4, 5 or more than 5 sites.

[0671] In one embodiment, the AAV particles from any relevant species, such as, but not limited to, human, dog, mouse, rat or monkey may be introduced into cells.

[0672] In one embodiment, the AAV particles may be introduced into cells which are relevant to the disease to be treated. As a non-limiting example, the disease is ALS and the target cells are neurons and astrocytes. As another non-limiting example, the disease is ALS and the target cells are medium spiny neurons, cortical neurons and astrocytes.

[0673] In one embodiment, the AAV particles may be introduced into cells which have a high level of endogenous expression of the target sequence.

[0674] In another embodiment, the AAV particles may be introduced into cells which have a low level of endogenous expression of the target sequence.

[0675] In one embodiment, the cells may be those which have a high efficiency of AAV transduction.

### Delivery to Subjects

[0676] The present disclosure additionally provides a method of delivering to a subject, including a mammalian subject, any of the above-described AAV polynucleotides or AAV genomes comprising administering to the subject said AAV polynucleotide or AAV genome, or administering to the subject a particle comprising said AAV polynucleotide or AAV genome, or administering to the subject any of the described compositions, including pharmaceutical compositions.

[0677] The pharmaceutical compositions of AAV particles described herein may be characterized by one or more of bioavailability, therapeutic window and/or volume of distribution.

### III. Administration and Dosing

### Administration

[0678] The AAV particles comprising a nucleic acid sequence encoding the siRNA molecules of the present invention may be administered by any route which results in a therapeutically effective outcome. These include, but are not limited to, within the parenchyma of an organ such as, but not limited to, a brain (e.g., intraparenchymal), corpus striatum (intrastriatal), enteral (into the intestine), gastroenteral, epidural, oral (by way of the mouth), transdermal, peridural, intracerebral (into the cerebrum), intracerebroventricular (into the cerebral ventricles), subpial (under the pia), epicutaneous (application onto the skin), intradermal, (into the skin itself), subcutaneous (under the skin), nasal administration (through the nose), intravenous (into a vein), intravenous bolus, intravenous drip, intraarterial (into an artery), intramuscular (into a muscle), intracardiac (into the heart), intraosseous infusion (into the bone marrow), intrathecal (into the spinal canal), intraganglionic (into the ganglion), intraperitoneal, (infusion or injection into the peritoneum), intravesical infusion, intravitreal, (through the eye), intracavernous injection (into a pathologic cavity) intracavitary (into the base of the penis), intravaginal administration, intrauterine, extra-amniotic administration, transdermal (diffusion through the intact skin for systemic distribution), transmucosal (diffusion through a mucous membrane), transvaginal, insufflation (snorting), sublingual, sublabial, enema, eye drops (onto the conjunctiva), in ear drops, auricular (in or by way of the ear), buccal (directed toward the cheek), conjunctival, cutaneous, dental (to a tooth or teeth), electro-osmosis, endocervical, endosinusial, endotracheal, extracorporeal, hemodialysis, infiltration, interstitial, intra-abdominal, intra-amniotic, intra-articular, intrabiliary, intrabronchial, intrabursal, intracartilaginous (within a cartilage), intracaudal (within the cauda equine), intracisternal (within the cistema magna cerebellomedularis), intracomeal (within the cornea), dental intracomal, intracoronary (within the coronary arteries), intracorporus cavemosum (within the dilatable spaces of the corporus cavemosa of the penis), intradiscal (within a disc), intraductal (within a duct of a gland), intraduodenal (within the duodenum), intradural (within or beneath the dura), intraepidermal (to the epidermis), intraesophageal (to the esophagus), intragastric (within the stomach), intragingival (within the gingivae), intraileal (within the distal portion of the small intestine), intralesional (within or introduced directly to a localized lesion), intraluminal (within a lumen of a tube), intralymphatic (within the lymph), intramedullary (within the marrow cavity of a bone), intrameningeal (within the meninges), intraocular (within the eye), intraovarian (within the ovary), intrapericardial (within the pericardium), intrapleural (within the pleura), intraprostatic (within the prostate gland), intrapulmonary (within the lungs or its bronchi), intrasinal (within the nasal or periorbital sinuses), intraspinal (within the vertebral column), intrasynovial (within the synovial cavity of a joint), intratendinous (within a tendon), intratesticular (within the testicle), intrathecal (within the cerebrospinal fluid at any level of the cerebrospinal axis), intrathoracic (within the thorax), intratubular (within the tubules of an organ), intratumor (within a tumor), intratympanic (within the aurus media), intravascular (within a vessel or vessels), intraventricular (within a ventricle), iontophoresis (by means of electric current where ions of soluble salts migrate into the tissues of the body), irrigation (to bathe or flush open wounds or body cavities), laryngeal (directly upon the larynx), nasogastric (through the nose and into the stomach), occlusive dressing technique (topical route administration which is then covered by a dressing which occludes the area), ophthalmic (to the external eye), oropharyngeal (directly to the mouth and pharynx), parenteral, percutaneous, periarticular, peridural, perineural, periodontal, rectal, respiratory (within the respiratory tract by inhaling orally or nasally for local or systemic effect), retrobulbar (behind the pons or behind the eyeball), soft tissue, subarachnoid, subconjunctival, submucosal, topical, transplacental (through or across the placenta), transtracheal (through the wall of the trachea), transtympanic (across or through the tympanic cavity), ureteral (to the ureter), urethral (to the urethra), vaginal, caudal block, diagnostic, nerve block, biliary perfusion, cardiac perfusion, photopheresis or spinal.

[0679] In specific embodiments, compositions of AAV particles comprising a nucleic acid sequence encoding the siRNA molecules of the present invention may be administered in a way which facilitates the vectors or siRNA molecule to enter the central nervous system and penetrate into medium spiny and/or cortical neurons and/or astrocytes.

[0680] In some embodiments, the AAV particles comprising a nucleic acid sequence encoding the siRNA molecules of the present invention may be administered by intramuscular injection.

[0681] In one embodiment, the AAV particles comprising a nucleic acid sequence encoding the siRNA molecules of the present invention may be administered via intraparenchymal injection.

[0682] In one embodiment, the AAV particles comprising a nucleic acid sequence encoding the siRNA molecules of the present invention may be administered via intraparenchymal injection and intrathecal injection.

[0683] In one embodiment, the AAV particles comprising a nucleic acid sequence encoding the siRNA molecules of the present invention may be administered via intrastriatal injection.

[0684] In one embodiment, the AAV particles comprising a nucleic acid sequence encoding the siRNA molecules of the present invention may be administered via intrastriatal injection and another route of administration described herein.

[0685] In some embodiments, AAV particles that express siRNA duplexes of the present invention may be administered to a subject by peripheral injections (e.g., intravenous) and/or intranasal delivery. It was disclosed in the art that the peripheral administration of AAV particles for siRNA duplexes can be transported to the central nervous system, for example, to the neurons (e.g., U. S. Patent Publication Nos. 20100240739; and 20100130594; the content of each of which is incorporated herein by reference in their entirety).

[0686] In other embodiments, compositions comprising at least one AAV particle comprising a nucleic acid sequence encoding the siRNA molecules of the present invention may be administered to a subject by intracranial delivery (See, e.g., U.S. Pat. No. 8,119,611; the content of which is incorporated herein by reference in its entirety).

[0687] The AAV particle comprising a nucleic acid sequence encoding the siRNA molecules of the present invention may be administered in any suitable form, either as a liquid solution or suspension, as a solid form suitable for liquid solution or suspension in a liquid solution. The siRNA duplexes may be formulated with any appropriate and pharmaceutically acceptable excipient.

[0688] The AAV particle comprising a nucleic acid sequence encoding the siRNA molecules of the present invention may be administered in a “therapeutically effective” amount, i.e., an amount that is sufficient to alleviate and/or prevent at least one symptom associated with the disease, or provide improvement in the condition of the subject.

[0689] In one embodiment, the AAV particle may be administered to the CNS in a therapeutically effective amount to improve function and/or survival for a subject with ALS. As a non-limiting example, the vector may be administered by direct infusion into the striatum.

[0690] In one embodiment, the AAV particle may be administered to a subject (e.g., to the CNS of a subject via intrathecal administration) in a therapeutically effective amount for the siRNA duplexes or dsRNA to target the medium spiny neurons, cortical neurons and/or astrocytes. As a non-limiting example, the siRNA duplexes or dsRNA may target SOD1 and reduce the expression of SOD1 protein or mRNA. As another non-limiting example, the siRNA duplexes or dsRNA target SOD1 and can suppress SOD1 and reduce SOD1 mediated toxicity. The reduction of SOD1 protein and/or mRNA as well as SOD1 mediated toxicity may be accomplished with almost no enhanced inflammation.

[0691] In one embodiment, the AAV particle may be administered to a subject (e.g., to the CNS of a subject) in a therapeutically effective amount to slow the functional decline of a subject (e.g., determined using a known evaluation method). As a non-limiting example, the vector may be administered via intraparenchymal injection.

[0692] In one embodiment, the AAV particle may be administered to the cistema magna in a therapeutically effective amount to transduce medium spiny neurons, cortical neurons and/or astrocytes. As a non-limiting example, the vector may be administered intrathecally.

[0693] In one embodiment, the AAV particle may be administered using intrathecal infusion in a therapeutically effective amount to transduce medium spiny neurons, cortical neurons and/or astrocytes. As a non-limiting example, the vector may be administered intrathecally.

[0694] In one embodiment, the AAV particle may be administered to the cisterna magna in a therapeutically effective amount to transduce medium spiny neurons, cortical neurons and/or astrocytes. As a non-limiting example, the vector may be administered by intraparenchymal injection.

[0695] In one embodiment, the AAV particle comprising a modulatory polynucleotide may be formulated. As a non-limiting example the baricity and/or osmolality of the formulation may be optimized to ensure optimal drug distribution in the central nervous system or a region or component of the central nervous system.

[0696] In one embodiment, the AAV particle comprising a modulatory polynucleotide may be delivered to a subject via a single route administration.

[0697] In one embodiment, the AAV particle comprising a modulatory polynucleotide may be delivered to a subject via a multi-site route of administration. A subject may be administered the AAV particle comprising a modulatory polynucleotide at 2, 3, 4, 5 or more than 5 sites.

[0698] In one embodiment, a subject may be administered the AAV particle comprising a modulatory polynucleotide described herein using a bolus injection.

[0699] In some embodiments, the efficacy of aministration of the AAV particle comprising a modulatory polynucleotide using a bolus injection may be measured by monitoring the gene transfer to the spinal cord, brain stem, or motor cortex. The biodistribution and cellular tropism may be monitored by any methods known in the art, such as, but not limited to, immunostaining, and the vector genome levels may be measured by digital PCR.

[0700] In one embodiment, a subject may be administered the AAV particle comprising a modulatory polynucleotide described herein using sustained delivery over a period of minutes, hours or days. The infusion rate may be changed depending on the subject, distribution, formulation or another delivery parameter.

[0701] In one embodiment, the AAV particle described herein is administered via putamen and caudate infusion. As a non-limiting example, the dual infusion provides a broad striatal distribution as well as a frontal and temporal cortical distribution.

[0702] In one embodiment, the AAV particle is AAV-DJ8 which is administered via unilateral putamen infusion. As a non-limiting example, the distribution of the administered AAV-DJ8 is similar to the distribution of AAV1 delivered via unilateral putamen infusion.

[0703] In one embodiment, the AAV particle described herein is administered via intrathecal (IT) infusion at C1. The infusion may be for 1, 2, 3, 4, 6, 7, 8, 9, 10, 11, 12, 13, 14, 15 or more than 15 hours.

[0704] In one embodiment, the selection of subjects for administration of the AAV particle described herein and/or the effectiveness of the dose, route of administration and/or volume of administration may be evaluated using imaging of the perivascular spaces (PVS) which are also known as Virchow-Robin spaces. PVS surround the arterioles and venules as they perforate brain parenchyma and are filled with cerebrospinal fluid (CSF)/interstitial fluid. PVS are common in the midbrain, basal ganglia, and centrum semiovale. While not wishing to be bound by theory, PVS may play a role in the normal clearance of metabolites and have been associated with worse cognition and several disease states including Parkinson's disease. PVS are usually are normal in size but they can increase in size in a number of disease states. Potter et al. (Cerebrovase Dis. 2015 January; 39(4): 224-231; the contents of which are herein incorporated by reference in its entirety) developed a grading method where they studied a full range of PVS and rated basal ganglia, centrum semiovale and midbrain PVS. They used the frequency and range of PVS used by Mac and Lullich et al. (J Neurol Neurosurg Psychiatry. 2004 November; 75(11): 1519-23; the contents of which are herein incorporated by reference in its entirety) and Potter et al. gave 5 ratings to basal ganglia and centrum semiovale PVS: 0 (none), 1 (1-10), 2 (11-20), 3 (21-40) and 4 (>40) and 2 ratings to midbrain PVS: 0 (non visible) or 1 (visible). The user guide for the rating system by Potter et al. can be found at: www.sbirc.ed.ac.uk/documents/epvs-rating-scale-user-guide.pdf.

### Dosing

[0705] The pharmaceutical compositions of the present invention may be administered to a subject using any amount effective for reducing, preventing and/or treating a disease and/or disorder. The exact amount required will vary from subject to subject, depending on the species, age, and general condition of the subject, the severity of the disease, the particular composition, its mode of administration, its mode of activity, and the like.

[0706] The compositions of the present invention are typically formulated in unit dosage form for ease of administration and uniformity of dosage. It will be understood, however, that the total daily usage of the compositions of the present invention may be decided by the attending physician within the scope of sound medical judgment. The specific therapeutic effectiveness for any particular patient will depend upon a variety of factors including the disorder being treated and the severity of the disorder: the activity of the specific compound employed; the specific composition employed; the age, body weight, general health, sex and diet of the patient; the time of administration, route of administration, and rate of excretion of the siRNA duplexes employed; the duration of the treatment; drugs used in combination or coincidental with the specific compound employed; and like factors well known in the medical arts.

[0707] As a non-limiting example, the dose may be determined based on the total volume of CSF of a subject. For example cynomolgus monkeys have a total estimated cerebrospinal fluid (CSF) volume of approximately 6 to 12 mL and humans have a total estimated CSF of approximately 120 to 150 mL, a factor of at least 10 to 12-fold. Therefore, a factor of 10× to 12× may be used to determine a human dose based on the dose to a cynomolgus monkey. In one embodiment, the factor is 10×. In another embodiment the factor is 11×. In yet another embodiment, the factor is 12×. In yet another embodiment, the factor may be, but is not limited to, 10×, 10.1×, 10.2×, 10.3×, 10.4×, 10.5×, 10.6×, 10.7×, 10.8×, 10.9×, 11×, 11.1×, 11.2×, 11.3×, 11.4×, 11.5×, 11.6×, 11.7×, 11.8×, 11.9×, 12×, 12.1×, 12.2×, 12.3×, 12.4×, and 12.5×.

[0708] In one embodiment, the age and sex of a subject may be used to determine the dose of the compositions of the present invention. As a non-limiting example, a subject who is older may receive a larger dose (e.g., 5-10%, 10-20%, 15-30%, 20-50%, 25-50% or at least 1%, 2%, 3%, 4%, 5%, 10%, 20%, 30%, 40%, 50%, 60%, 70%, 80%, 90% or more than 90% more) of the composition as compared to a younger subject. As another non-limiting example, a subject who is younger may receive a larger dose (e.g., 5-10%, 10-20%, 15-30%, 20-50%, 25-50% or at least 1%, 2%, 3%, 4%, 5%, 10%, 20%, 30%, 40%, 50%, 60%, 70%, 80%, 90% or more than 90% more) of the composition as compared to an older subject. As yet another non-limiting example, a subject who is female may receive a larger dose (e.g., 5-10%, 10-20%, 15-30%, 20-50%, 25-50% or at least 1%, 2%, 3%, 4%, 5%, 10%, 20%, 30%, 40%, 50%, 60%, 70%, 80%, 90% or more than 90% more) of the composition as compared to a male subject. As yet another non-limiting example, a subject who is male may receive a larger dose (e.g., 5-10%, 10-20%, 15-30%, 20-50%, 25-50% or at least 1%, 2%, 3%, 4%, 5%, 10%, 20%, 30%, 40%, 50%, 60%, 70%, 80%, 90% or more than 90% more) of the composition as compared to a female subject

[0709] In some specific embodiments, the doses of AAV particles for delivering siRNA duplexes of the present invention may be adapted depending on the disease condition, the subject and the treatment strategy.

[0710] In one embodiment, delivery of the compositions in accordance with the present invention to cells comprises a rate of delivery defined by [VG/hour=mL/hour*VG/mL] wherein VG is viral genomes, VG/mL is composition concentration, and mL/hour is rate of prolonged delivery.

[0711] In one embodiment, delivery of compositions in accordance with the present invention to cells may comprise a total concentration per subject between about 1×10⁶ VG and about 1×10¹⁶ VG. In some embodiments, delivery may comprise a composition concentration of about 1×10⁶, 2×10⁶, 3×10⁶, 4×10⁶, 5×10⁶, 6×10⁶, 7×10⁶, 8×10⁶, 9×10⁶, 1×10′, 2×10⁷, 3×10⁷, 4×10⁷, 5×10⁷, 6×10⁷, 7×10⁷, 8×10⁷, 9×10⁷, 1×10⁸, 2×10⁸, 3×10⁸, 4×10⁸, 5×10, 6×10, 7×10⁸, 8×10⁸, 9×10⁸, 1×10⁹, 2×10⁹, 3×10⁹, 4×10⁹, 5×10⁹, 6×10⁹, 7×10⁹, 8×10⁹, 9×10⁹, 1×10¹⁰, 2×10¹⁰, 3×10¹⁰, 4×10¹⁰, 5×10¹⁰, 6×10¹⁰, 7×10¹⁰, 8×10¹⁰, 9×10¹⁰, 1×10¹⁰, 1.1×10¹¹, 1.2×10¹¹, 1.3×10¹¹, 1.4×10¹¹, 1.5×10¹¹, 1.6×10¹¹, 1.7×10¹¹, 1.8×10¹¹, 1.9×10¹¹, 2×10¹¹, 2×10¹¹, 2.2×10¹¹, 2.3×10¹¹, 2.4×10¹¹, 2.5×10¹¹, 2.6×10¹¹, 2.7×10¹¹, 2.8×10¹¹, 2.9×10¹¹, 3×10¹¹, 4×10¹¹, 5×10¹¹, 6×10¹¹, 7×10¹¹, 7.1×10¹¹, 7.2×10¹¹, 7.3×10¹¹, 7.4×10¹¹, 7.5×10¹¹, 7.6×10¹¹, 7.7×10¹¹, 7.8×10¹¹, 7.9×10¹¹, 8×10¹¹, 9×10¹¹, 1×10¹², 1.1×10¹², 1.2×10¹², 1.3×10¹², 1.4×10¹², 1.5×10¹², 1.6×10¹², 1.7×10¹², 1.8×10¹², 1.9×10¹², 2×10¹², 2.1×10¹², 2.2×10¹², 2.3×10¹², 2.4×10¹², 2.5×10¹², 2.6×10¹², 2.7×10¹², 2.8×10¹¹, 2.9×10¹², 3×10¹², 3.1×10¹², 3.2×10¹², 3.3×10¹², 3.4×10¹², 3.5×10¹², 3.6×10¹², 3.7×10¹², 3.8×10¹², 3.9×10, 4×10¹², 4.1×10¹², 4.2×10¹², 4.3×10¹², 4.4×10¹², 4.5×10¹², 4.6×10¹², 4.7×10¹², 4.8×10¹², 4.9×10¹², 5×10¹², 6×10¹², 6.1×10¹², 6.2×10¹², 6.3×10¹², 6.4×10¹², 6.5×10¹², 6.6×10¹², 6.7×10¹², 6.8×10¹², 6.9×10¹², 7×10¹², 8×10¹², 8.1×10¹², 8.2×10¹², 8.3×10¹², 8.4×10¹², 8.5×10¹², 8.6×10¹², 8.7×10¹², 8.8×10¹², 8.9×10¹², 9×10¹², 1×10¹³, 1.1×10¹³, 1.2×10¹³, 1.3×10¹³, 1.4×10¹³, 1.5×10¹³, 1.6×10¹⁴, 1.7×10¹³, 1.8×10¹³, 1.9×10¹³, 2×10¹³, 3×10¹³, 4×10¹³, 5×10¹³, 6×10¹³, 6.7×10¹³, 7×10¹³, 8×10¹³, 9×10¹³, 1×10¹⁴, 2×10¹⁴, 3×10¹⁴, 4×10¹⁴, 5×10¹⁴, 6×10¹⁴, 7×10¹⁴, 8×10¹⁴, 9×10¹⁴, 1×10¹⁵, 2×10¹⁵, 3×10¹⁵, 4×10¹⁵, 5×10¹⁵, 6×10¹⁵, 7×10¹⁵, 8×10¹⁵, 9×10¹⁵, or 1×10¹⁶ VG/subject.

[0712] In one embodiment, delivery of compositions in accordance with the present invention to cells may comprise a total concentration per subject between about 1×10⁶ VG/kg and about 1×10¹⁶ VG/kg. In some embodiments, delivery may comprise a composition concentration of about 1×10⁶, 2×10⁶, 3×10⁶, 4×10⁶, 5×10⁶, 6×10⁶, 7×10⁶, 8×10⁶, 9×10⁶, 1×10⁷, 2×10⁷, 3×10⁷, 4×10⁷, 5×10⁷, 6×10⁷, 7×10⁷, 8×10⁷, 9×10⁷, 1×10⁸, 2×10⁸, 3×10⁸, 4×10⁸, 5×10⁸, 6×10⁸, 7×10⁸, 8×10⁸, 9×10⁸, 1×10⁹, 2×10⁹, 3×10⁹, 4×10⁹, 5×10⁹, 6×10⁹, 7×10⁹, 8×10⁹, 9×10⁹, 1×10¹⁰, 2×10¹⁰, 3×10¹⁰, 4×10¹⁰, 5×10¹⁰, 6×10¹⁰, 7×10¹⁰, 8×10¹⁰, 9×10¹⁰, 1×10¹¹, 1.1×10¹¹, 1.2×10¹¹, 1.3×10¹¹, 1.4×10¹¹, 1.5×10¹¹, 1.6×10¹¹, 1.7×10¹¹, 1.8×10¹¹, 1.9×10¹¹, 2×10¹¹ 2.1×10¹¹, 2.2×10¹¹, 2.3×10¹¹, 2.4×10¹¹, 2.5×10¹¹, 2.6×10¹¹, 2.7×10¹¹, 2.8×10¹¹, 2.9×10¹¹, 3×10¹¹, 4×10¹¹, 5×10¹¹, 6×10¹¹, 7×10¹¹, 7.1×10¹¹, 7.2×10¹¹, 7.3×10¹¹, 7.4×10¹¹, 7.5×10¹¹, 7.6×10¹¹, 7.7×10¹¹, 7.8×10¹¹, 7.9×10¹¹, 8×10¹¹, 9×10¹¹, 1×10¹², 1.1×10¹², 1.2×10¹², 1.3×10¹², 1.4×10¹², 1.5×10¹², 1.6×10¹², 1.7×10¹², 1.8×10¹², 1.9×10¹², 2×10¹², 2.1×10¹², 2.2×10¹², 2.3×10¹², 2.4×10¹², 2.5×10¹², 2.6×10¹², 2.7×10¹², 2.8×10¹², 2.9×10¹², 3×10¹², 3.1×10¹², 3.2×10¹², 3.3×10¹², 3.4×10¹², 3.5×10¹², 3.6×10¹², 3.7×10¹², 3.8×10¹², 3.9×10¹², 4×10¹², 4.1×10¹², 4.2×10¹², 4.3×10¹², 4.4×10¹², 4.5×10¹², 4.6×10¹², 4.7×10¹², 4.8×10¹², 4.9×10¹², 5×10¹², 6×10¹², 6.1×10¹², 6.2×10¹², 6.3×10¹², 6.4×10¹², 6.5×10¹², 6.6×10¹², 6.7×10¹², 6.8×10¹², 6.9×10¹², 7×10¹², 8×10¹², 8.1×10¹², 8.2×10¹², 8.3×10¹², 8.4×10¹², 8.5×10¹², 8.6×10¹², 8.7×10¹², 8.8×10¹², 8.9×10¹², 9×10¹², 1×10¹³, 1.1×10¹³, 1.2×10¹³, 1.3×10¹³, 1.4×10¹³, 1.5×10¹³, 1.6×10¹³, 1.7×10¹³, 1.8×10¹³, 1.9×10¹³, 2×10¹³, 3×10¹³, 4×10¹³, 5×10¹³, 6×10¹³, 6.7×10¹³, 7×10¹³, 8×10¹³, 9×10¹³, 1×10¹⁴, 2×10¹⁴, 3×10¹⁴, 4×10¹⁴, 5×10¹⁴, 6×10¹⁴, 7×10¹⁴, 8×10¹⁴, 9×10¹⁴, 1×10¹⁵, 2×10¹⁵, 3×10¹⁵, 4×10¹⁵, 5×10¹⁵, 6×10¹⁵, 7×10¹⁵, 8×10¹⁵, 9×10¹⁵, or 1×10¹⁶ VG/kg.

[0713] In one embodiment, about 10⁵ to 10⁶ viral genome (unit) may be administered per dose.

[0714] In one embodiment, delivery of the compositions in accordance with the present invention to cells may comprise a total concentration between about 1×10⁶ VG/mL and about 1×10¹⁶ VG/mL. In some embodiments, delivery may comprise a composition concentration of about 1×10⁶, 2×10⁶, 3×10⁶, 4×10⁶, 5×10⁶, 6×10⁶, 7×10⁶, 8×10⁶, 9×10⁶, 1×10⁷, 2×10⁷, 3×10⁷, 4×10⁷, 5×10⁷, 6×10⁷, 7×10⁷, 8×10⁷, 9×10⁷, 1×10⁸, 2×10⁸, 3×10⁸, 4×10⁸, 5×10⁹, 6×10⁸, 7×10⁸, 8×10⁸, 9×10⁸, 1×10⁹, 2×10⁹, 3×10⁹, 4×10⁹, 5×10⁹, 6×10⁹, 7×10⁹, 8×10⁹, 9×10⁹, 1×10¹⁰, 2×10¹⁰, 3×10¹⁰, 4×10¹⁰, 5×10¹⁰, 6×10^{1U}, 7×10¹⁰, 8×10¹⁰, 9×10¹⁰, 1×10¹¹, 1.1×10¹¹, 1.2×10¹¹, 1.3×10¹¹, 1.4×10¹¹, 1.5×10¹¹, 1.6×10¹¹, 1.7×10¹¹, 1.8×10¹¹, 1.9×10¹¹, 2×10¹¹, 3×10¹¹, 4×10¹¹, 5×10¹¹, 6×10¹¹, 7×10¹¹, 8×10¹¹, 9×10¹¹, 1×10¹², 1.1×10¹², 1.2×10¹², 1.3×10¹², 1.4×10¹², 1.5×10¹², 1.6×10¹², 1.7×10¹², 1.8×10¹², 1.9×10¹², 2×10¹², 2.1×10¹², 2.2×10¹², 2.3×10¹², 2.4×10¹², 2.5×10¹², 2.6×10¹², 2.7×10¹², 2.8×10¹², 2.9×10¹², 3×10¹², 3.1×10¹², 3.2×10¹², 3.3×10¹², 3.4×10¹², 3.5×10¹², 3.6×10¹², 3.7×10¹², 3.8×10¹², 3.9×10¹², 4×10¹², 4.1×10¹², 4.2×10¹², 4.3×10¹², 4.4×10¹², 4.5×10¹², 4.6×10¹², 4.7×10¹², 4.8×10¹², 4.9×10¹², 5×10¹², 6×10¹², 6.1×10¹², 6.2×10¹², 6.3×10¹², 6.4×10¹², 6.5×10¹², 6.6×10¹², 6.7×10¹², 6.8×10¹², 6.9×10¹², 7×10¹², 8×10¹², 9×10¹², 1×10¹³, 1.1×10¹³, 1.2×10¹³, 1.3×10¹³, 1.4×10¹³, 1.5×10¹³, 1.6×10¹³, 1.7×10¹³, 1.8×10¹³, 1.9×10¹³, 2×10¹³, 3×10¹³, 4×10¹³, 5×10¹³, 6×10¹³, 6.7×10¹³, 7×10¹³, 8×10¹³, 9×10¹³, 1×10¹⁴, 2×10¹⁴, 3×10¹⁴, 4×10¹⁴, 5×10¹⁴, 6×10¹⁴, 7×10¹⁴, 8×10¹⁴, 9×10¹⁴, 1×10¹⁵, 2×10¹⁵, 3×10¹⁵, 4×10¹⁵, 5×10¹⁵, 6×10¹⁵, 7×10¹⁵, 8×10¹⁵, 9×10¹⁵, or 1×10¹⁶ VG/mL.

[0715] In certain embodiments, the desired siRNA duplex dosage may be delivered using multiple administrations (e.g., two, three, four, five, six, seven, eight, nine, ten, eleven, twelve, thirteen, fourteen, or more administrations). When multiple administrations are employed, split dosing regimens such as those described herein may be used. As used herein, a “split dose” is the division of single unit dose or total daily dose into two or more doses, e.g., two or more administrations of the single unit dose. As used herein, a “single unit dose” is a dose of any modulatory polynucleotide therapeutic administered in one dose/at one time/single route/single point of contact, i.e., single administration event. As used herein, a “total daily dose” is an amount given or prescribed in a 24 hour period. It may be administered as a single unit dose. In one embodiment, the AAV particles comprising the modulatory polynucleotides of the present invention are administered to a subject in split doses. They may be formulated in buffer only or in a formulation described herein.

[0716] In one embodiment, the dose, concentration and/or volume of the composition described herein may be adjusted depending on the contribution of the caudate or putamen to cortical and subcortical distribution after administration. The administration may be intracerebroventricular, intraputamenal, intrathalmic, intraparenchymal, subpial, and/or intrathecal administration.

[0717] In one embodiment, the dose, concentration and/or volume of the composition described herein may be adjusted depending on the cortical and neuraxial distribution following administration by intracerebroventricular, intraputamenal, intrathalmic, intraparenchymal, subpial, and/or intrathecal delivery.

### IV. Methods and Uses of the Compositions of the Invention

### Amyotrophic Lateral Sclerosis (ALS)

### Amyotrophic Lateral Sclerosis (ALS)

[0718] Amyotrophic lateral sclerosis (ALS), an adult-onset neurodegenerative disorder, is a progressive and fatal disease characterized by the selective death of motor neurons in the motor cortex, brainstem and spinal cord. The incidence of ALS is about 1.9 per 100,000. Patients diagnosed with ALS develop a progressive muscle phenotype characterized by spasticity, hyperreflexia or hyporeflexia, fasciculations, muscle atrophy and paralysis. These motor impairments are caused by the denervation of muscles due to the loss of motor neurons. The major pathological features of ALS include degeneration of the corticospinal tracts and extensive loss of lower motor neurons (LMNs) or anterior horn cells (Ghatak et al., J Neuropathol Exp Neurol., 1986, 45, 385-395), degeneration and loss of Betz cells and other pyramidal cells in the primary motor cortex (Udaka et al., Acta Neuropathol, 1986, 70, 289-295; Maekawa et al., Brain, 2004, 127, 1237-1251) and reactive gliosis in the motor cortex and spinal cord (Kawamata et al., Am J Pathol., 1992, 140, 691-707; and Schiffer et al., Neurol Sci., 1996, 139, 27-33). ALS is usually fatal within 3 to 5 years after the diagnosis due to respiratory defects and/or inflammation (Rowland L P and Shneibder N A, N Engl. J. Med., 2001, 344, 1688-1700).

[0719] A cellular hallmark of ALS is the presence of proteinaceous, ubiquitinated, cytoplasmic inclusions in degenerating motor neurons and surrounding cells (e.g., astrocytes). Ubiquitinated inclusions (i.e., Lewy body-like inclusions or Skein-like inclusions) are the most common and specific type of inclusion in ALS and are found in LMNs of the spinal cord and brainstem, and in corticospinal upper motor neurons (UMNs) (Matsumoto et al., J Neurol Sci., 1993, 115, 208-213; and Sasak and Maruyama, Acta Neuropathol., 1994, 87, 578-585). A few proteins have been identified to be components of the inclusions, including ubiquitin. Cu/Zn superoxide dismutase 1 (SOD1), peripherin and Dorfin, Neurofilamentous inclusions are often found in hyaline conglomerate inclusions (HCIs) and axonal ‘spheroids’ in spinal cord motor neurons in ALS. Other types and less specific inclusions include Bunina bodies (cystatin C-containing inclusions) and Crescent shaped inclusions (SCIs) in upper layers of the cortex. Other neuropathological features seen in ALS include fragmentation of the Golgi apparatus, mitochondrial vacuolization and ultrastructural abnormalities of synaptic terminals (Fujita et al., Acta Neuropathol. 2002, 103, 243-247).

[0720] In addition, in frontotemporal dementia ALS (FTD-ALS) cortical atrophy (including the frontal and temporal lobes) is also observed, which may cause cognitive impairment in FTD-ALS patients.

[0721] ALS is a complex and multifactorial disease and multiple mechanisms hypothesized as responsible for ALS pathogenesis include, but are not limited to, dysfunction of protein degradation, glutamate excitotoxicity, mitochondrial dysfunction, apoptosis, oxidative stress, inflammation, protein misfolding and aggregation, aberrant RNA metabolism, and altered gene expression.

[0722] About 10%-15% of ALS cases have family history of the disease, and these patients are referred to as familial ALS (fALS) or inherited patients, commonly with a Mendelian dominant mode of inheritance and high penetrance. The remainder (approximately 85%-95%) is classified as sporadic ALS (sALS), as they are not associated with a documented family history, but instead are thought to be due to other risk factors including, but not limited to environmental factors, genetic polymorphisms, somatic mutations, and possibly gene-environmental interactions. In most cases, familial (or inherited) ALS is inherited as autosomal dominant disease, but pedigrees with autosomal recessive and X-linked inheritance and incomplete penetrance exist. Sporadic and familial forms are clinically indistinguishable suggesting a common pathogenesis. The precise cause of the selective death of motor neurons in ALS remains elusive. Progress in understanding the genetic factors in fALS may shed light on both forms of the disease.

[0723] Recently, an exploration into genetic causes of ALS has discovered mutations in more than 10 different genes that are known to cause fALS. The most common ones are found in the genes encoding Cu/Zn superoxide dismutase 1 (SOD1; ˜20%) (Rosen D R et al., Nature, 1993, 362, 59-62), fused in sarcoma/translated in liposarcoma (FUS/TLS; 1-5%) and TDP-43 (TARDBP; 1-5%). Recently, a hexanucleotide repeat expansion (GGGGCC)n in the C9orF72 gene was identified as the most frequent cause of fALS (˜40%) in the Western population (reviewed by Renton et al., Nat. Neurosci., 2014, 17, 17-23). Other genes mutated in ALS include alsin (ALS2), senataxin (SETX), vesicle-associated membrane protein (VAPB), and angiogenin (ANG), fALS genes control different cellular mechanisms, suggesting that the pathogenesis of ALS is complicated and may be related to several different processes finally leading to motor neuron degeneration.

[0724] Subjects with ALS and an identified mutation in a known ALS-causative gene may be referred to as having “genetically defined ALS.” Non-limiting examples of ALS-causative genes include SOD1, C9orf72, TARDBP (also termed TDP-43), FUS/TLS, OPTN, UBQLN2, PFN1, DCTN1, and TBK1.

[0725] SOD1 is one of the three human superoxide dismutases identified and characterized in mammals: copper-zinc superoxide dismutase (Cu/ZnSOD or SOD1), manganese superoxide dismutase (MnSOD or SOD2), and extracellular superoxide dismutase (ECSOD or SOD3). SOD1 is a 32 kDa homodimer of a 153-residue polypeptide with one copper- and one zinc-binding site per subunit, which is encoded by the SOD1 gene (GeneBank access No.: NM_000454.4; SEQ ID NO: 1254) on human chromosome 21. SOD1 catalyzes the reaction of superoxide anion (O²⁻) into molecular oxygen (O₂) and hydrogen peroxide (H₂O₂) at a bound copper ion. The intracellular concentration of SOD1 is high (ranging from 10 to 100 μM), accounting for 1% of the total protein content in the central nervous system (CNS). The protein is localized not only in the cytoplasm but also in the nucleus, lysosomes, peroxisomes, and mitochondrial intermembrane spaces in eukaryotic cells (Lindenau J et al., Glia, 2000, 29, 25-34).

[0726] Mutations in the SOD1 gene are carried by 15-20% of fALS patients and by 1-2% of all ALS cases. Currently, at least 170 different mutations distributed throughout the 153-amino acid SOD1 polypeptide have been found to cause ALS, and an updated list can be found at the ALS online Genetic Database (ALSOD) (Wroe R et al., Amyotroph Lateral Scler., 2008, 9, 249-250). Table 21 lists some examples of mutations in SOD1 in ALS. These mutations are predominantly single amino acid substitutions (i.e. missense mutations) although deletions, insertions, and C-terminal truncations also occur. Different SOD1 mutations display different geographic distribution patterns. For instance, 40-50% of all Americans with ALS caused by SOD1 gene mutations have a particular mutation Ala4Val (or A4V). The A4V mutation is typically associated with more severe signs and symptoms and the survival period is typically 2-3 years. The I113T mutation is by far the most common mutation in the United Kingdom. The most prevalent mutation in Europe is D90A substitute and the survival period is usually greater than 10 years.

TABLE 21
Examples of SOD1 mutations in ALS

| Location | Mutations |
|---|---|
| Exon1 (220 bp) | Q22L; E2IK, G; F20C; N19S; G16A, S; V14M, S; |
| | G12R; G1OG, V, R; L8Q, V; V7E; C6G, F; V5L; |
| | A4T, V, S |
| Exon2 (97 bp) | T54R; E49K; H48R, Q; V47F, A; H46R; F45C; H43R; |
| | G41S, D; G37R; V29, insA |
| Exon3 (70 bp) | D76Y, V, G72S, C; L67R, P66A; N65S; S59I, S |
| Exon4 (118 bp) | D124G, V; V118L, InsAAAAC; L117V; T116T; R115G; |
| | G114A; I113T, F; I112M, T; G108V; L106V, F; |
| | S106L, deITCACTC; I104F; D101G, Y, H, N, |
| | E100G, K; I99V, V97L, M; D96N, V, A95T, V; |
| | G93S, V, A, C, R, D; D90V, A; A89T, V; |
| | T88delACTGCTGAC, V87A, M; N861, S, D, K, |
| | G85R, S; L84V, F; H80R |
| Exon5 (461 bp) | I151T, S; I149T; V148I, G; G147D, R; C146R, stop; |
| | A145T, G; L144F, S; G141E, stop; A140A, G; |
| | N139D, K, H, N; G138E; T137R; S134N; E133V, |
| | delGAA, insTT; E132insTT; G127R, InsTGGG; |
| | L126S, delITT, stop; D126, delTT |

[0727] To investigate the mechanism of neuronal death associated with SOD1 gene defects, several rodent models of SOD1-linked ALS were developed in the art, which express the human SOD1 gene with different mutations, including missense mutations, small deletions or insertions. Non-limiting examples of ALS mouse models include SOD1^{G93A}, SOD1^{A4V}, SOD1^{G37R}, SOD1^{G85R}, SOD1^{D90A}, SOD1^{L84V}, SOD1^{I113T}, SOD1^{H36R/H48Q}, SOD1^{G127X}, SOD1^{L126X} and SOD1^{L126delTT}. There are two transgenic rat models carrying two different human SOD1 mutations: SOD1^{H46R} and SOD1^{G93R}. These rodent ALS models can develop muscle weakness similar to human ALS patients and other pathogenic features that reflect several characteristics of the human disease, in particular, the selective death of spinal motor neurons, aggregation of protein inclusions in motor neurons and microglial activation. It is well known in the art that the transgenic rodents are good models of human SOD1-associated ALS disease and provide models for studying disease pathogenesis and developing disease treatment.

[0728] Studies in animal and cellular models showed that SOD1 pathogenic variants cause ALS by gain of function. That is to say, the superoxide dismutase enzyme gains new but harmful properties when altered by SOD1 mutations. For example, some SOD1 mutated variants in ALS increase oxidative stress (e.g., increased accumulation of toxic superoxide radicals) by disrupting the redox cycle. Other studies also indicate that some SOD1 mutated variants in ALS might acquire toxic properties that are independent of its normal physiological function (such as abnormal aggregation of misfolded SOD1 variants. In the aberrant redox chemistry model, mutant SOD1 is unstable and through aberrant chemistry interacts with nonconventional substrates causing overproduction of reactive oxygen species (ROS). In the protein toxicity model, unstable, misfolded SOD1 aggregates into cytoplasmic inclusion bodies, sequestering proteins crucial for cellular processes. These two hypotheses are not mutually exclusive. It has been shown that oxidation of selected histidine residues that bind metals in the active site mediates SOD1 aggregation.

[0729] The aggregated mutant SOD1 protein may also induce mitochondrial dysfunction (Vehvilainen P et al., Front Cell Neurosci., 2014, 8, 126), impairment of axonal transport, aberrant RNA metabolism, glial cell pathology and glutamate excitotoxicity. In some sporadic ALS cases, misfolded wild-type SOD1 protein is found in diseased motor neurons which forms a “toxic conformation” that is similar to that which is seen with familial ALS-linked SOD1 variants (Rotunno M S and Bosco D A, Front Cell Neurosci., 2013, 16, 7, 253). Such evidence suggests that ALS is a protein folding diseases analogous to other neurodegenerative diseases such as Alzheimer's disease and Parkinson's disease.

[0730] Currently, no curative treatments are available for patients suffering from ALS. The only FDA approved drug Riluzole, an inhibitor of glutamate release, has a moderate effect on ALS, only extending survival by 2-3 months if it is taken for 18 months. Unfortunately, patients taking riluzole do not experience any slowing in disease progression or improvement in muscle function. Therefore, riluzole does not present a cure, or even an effective treatment. Researchers continue to search for better therapeutic agents.

[0731] Therapeutic approaches that may prevent or ameliorate SOD1 aggregation have been tested previously. For example, arimoclomol, a hydroxylamine derivative, is a drug that targets heat shock proteins, which are cellular defense mechanisms against these aggregates. Studies demonstrated that treatment with arimoclomol improved muscle function in SOD1 mouse models. Other drugs that target one or more cellular defects in ALS may include AMPA antagonists such as talampanel, beta-lactam antibiotics, which may reduce glutamate-induced excitotoxicity to motor neurons: Bromocriptine that may inhibit oxidative induced motor neuron death (e.g. U.S. Patent publication No. 20110105517; the content of which is incorporated herein by reference in its entirety); 1,3-diphenylurea derivative or multikinase inhibitor which may reduce SOD1 gene expression (e.g., U.S. Patent Publication No. 20130225642; the content of which is incorporated herein by reference in its entirety); dopamine agonist pramipexole and its anantiomer dexpramipexole, which may ameliorate the oxidative response in mitochondria; nimesulide, which inhibits cyclooxygenase enzyme (e.g., U.S. Patent Publication No. 20060041022; the content of which is incorporated herein by reference in its entirety): drugs that act as free radical scavengers (e.g. U.S. Pat. No. 6,933,310 and PCT Patent Publication No.: WO2006075434; the content of each of which is incorporated herein by reference in their entirety).

[0732] Another approach to inhibit abnormal SOD1 protein aggregation is to silence/inhibit SOD1 gene expression in ALS. It has been reported that small interfering RNAs for specific gene silencing of the mutated allele are therapeutically beneficial for the treatment of fALS (e.g., Ralgh G S et al., Nat. Medicine, 2005, 11(4), 429-433: and Raoul C et al., Nat. Medicine, 2005, 11(4), 423-428; and Maxwell M M et al., PNAS, 2004, 101(9), 3178-3183; and Ding H et al., Chinese Medical J., 2011, 124(1), 106-110; and Scharz D S et al., Plos Genet., 2006, 2(9), e140; the content of each of which is incorporated herein by reference in their entirety).

[0733] Many other RNA therapeutic agents that target the SOD1 gene and modulate SOD1 expression in ALS are taught in the art. Such RNA based agents include antisense oligonucleotides and double stranded small interfering RNAs. See, e.g., Wang H et al., J Biol. Chem., 2008, 283(23), 15845-15852): U.S. Pat. Nos. 7,498,316; 7,632,938; 7,678,895; 7,951,784; 7,977,314; 8,183,219; 8,309,533 and 8, 586, 554: and U.S. Patent publication Nos. 2006/0229268 and 2011/0263680; the content of each of which is herein incorporated by reference in their entirety.

[0734] The present invention provides AAV particles comprising modulatory polynucleotides comprising sequences encoding siRNA molecules targeting the SOD1 gene and methods for their design and manufacture. The AAV particles comprising the nucleic acid sequence encoding the siRNA molecules of the present invention may increase the delivery of active agents into motor neurons. The siRNA duplexes or encoding dsRNA targeting the SOD1 gene may be able to inhibit SOD1 gene expression (e.g., mRNA level) significantly inside cells: therefore, ameliorating SOD1 expression induced stress inside the cells such as aggregation of protein and formation of inclusions, increased free radicals, mitochondrial dysfunction and RNA metabolism.

[0735] Such siRNA mediated SOD1 expression inhibition may be used for treating ALS. According to the present invention, methods for treating and/or ameliorating ALS in a patient comprises administering to the patient an effective amount of AAV particle comprising a nucleic acid sequence encoding the siRNA molecules of the present invention into cells. The administration of the AAV particle comprising such a nucleic acid sequence will encode the siRNA molecules which cause the inhibition/silence of SOD1 gene expression.

[0736] In one embodiment, the AAV particle comprising the modulatory polynucleotide, reduce the expression of mutant SOD1 in a subject. The reduction of mutant SOD1 can also reduce the formation of toxic aggregates which can cause mechanisms of toxicity such as, but not limited to, oxidative stress, mitochondrial dysfunction, impaired axonal transport, aberrant RNA metabolism, glial cell pathology and/or glutamate excitotoxicity.

[0737] In one embodiment, the vector, e.g., AAV particles, reduces the amount of SOD1 in a subject in need thereof and thus provides a therapeutic benefit as described herein.

### Method of Treatment of ALS

[0738] Provided in the present invention are methods for introducing the AAV particles comprising modulatory polynucleotides comprising sequences comprising a nucleic acid sequence encoding the siRNA molecules of the present invention into cells, the method comprising introducing into said cells any of the vectors in an amount sufficient for degradation of target SOD1 mRNA to occur, thereby activating target-specific RNAi in the cells. In some aspects, the cells may be stem cells, neurons such as motor neurons, muscle cells and glial cells such as astrocytes.

[0739] Disclosed in the present invention are methods for treating ALS associated with abnormal SOD1 function in a subject in need of treatment. The method optionally comprises administering to the subject a therapeutically effective amount of a composition comprising at least AAV particles comprising modulatory polynucleotides comprising a nucleic acid sequence encoding the siRNA molecules of the present invention. As a non-limiting example, the siRNA molecules can silence SOD1 gene expression, inhibit SOD1 protein production, and reduce one or more symptoms of ALS in the subject such that ALS is therapeutically treated.

[0740] In some embodiments, the composition comprising the AAV particles comprising modulatory polynucleotides comprising a nucleic acid sequence encoding the siRNA molecules of the present invention is administered to the central nervous system of the subject. In other embodiments, the composition comprising the AAV particles comprising modulatory polynucleotides comprising a nucleic acid sequence encoding the siRNA molecules of the present invention is administered to the muscles of the subject

[0741] In particular, the AAV particles comprising modulatory polynucleotides comprising a nucleic acid sequence encoding the siRNA molecules of the present invention may be delivered into specific types of targeted cells, including motor neurons; glial cells including oligodendrocyte, astrocyte and microglia: and/or other cells surrounding neurons such as T cells. Studies in human ALS patients and animal SOD1 ALS models implicate glial cells as playing an early role in the dysfunction and death of motor neurons. Normal SOD1 in the surrounding, protective glial cells can prevent the motor neurons from dying even though mutant SOD1 is present in motor neurons (e.g., reviewed by Philips and Rothstein, Exp. Neurol., 2014, May 22. pii: S0014-4886(14)00157-5; the content of which is incorporated herein by reference in its entirety).

[0742] In some specific embodiments, the AAV particles comprising modulatory polynucleotides comprising a nucleic acid sequence encoding the siRNA molecules of the present invention may be used as a therapy for ALS.

[0743] In some embodiments, the present composition is administered as a solo therapeutics or combination therapeutics for the treatment of ALS.

[0744] The AAV particles comprising modulatory polynucleotides comprising a nucleic acid sequence encoding the siRNA molecules targeting the SOD1 gene may be used in combination with one or more other therapeutic agents. By “in combination with,” it is not intended to imply that the agents must be administered at the same time and/or formulated for delivery together, although these methods of delivery are within the scope of the present disclosure. Compositions can be administered concurrently with, prior to, or subsequent to, one or more other desired therapeutics or medical procedures. In general, each agent will be administered at a dose and/or on a time schedule determined for that agent.

[0745] Therapeutic agents that may be used in combination with the AAV particles comprising modulatory polynucleotides comprising a nucleic acid sequence encoding the siRNA molecules of the present invention can be small molecule compounds which are antioxidants, anti-inflammatory agents, anti-apoptosis agents, calcium regulators, antiglutamatergic agents, structural protein inhibitors, and compounds involved in metal ion regulation.

[0746] Compounds tested for treating ALS which may be used in combination with the vectors described herein include, but are not limited to, antiglutamatergic agents: Riluzole, Topiramate, Talampanel, Lamotrigine, Dextromethorphan, Gabapentin and AMPA antagonist; Anti-apoptosis agents: Minocycline, Sodium phenylbutyrate and Arimoclomol; Anti-inflammatory agent: ganglioside, Celecoxib, Cyclosporine, Azathioprine, Cyclophosphamide, Plasmaphoresis, Glatiramer acetate and thalidomide; Ceftriaxone (Berry et al., Plos One, 2013, 8(4)); Beat-lactam antibiotics; Pramipexole (a dopamine agonist) (Wang et al., Amyotrophic Lateral Scler., 2008, 9(1), 50-58); Nimesulide in U.S. Patent Publication No. 20060074991; Diazoxide disclosed in U.S. Patent Publication No. 20130143873); pyrazolone derivatives disclosed in US Patent Publication No. 20080161378; free radical scavengers that inhibit oxidative stress-induced cell death, such as bromocriptine (US. Patent Publication No. 20110105517); phenyl carbamate compounds discussed in PCT Patent Publication No. 2013100571; neuroprotective compounds disclosed in U.S. Pat. Nos. 6,933,310 and 8,399,514 and US Patent Publication Nos. 20110237907 and 20140038927; and glycopeptides taught in U.S. Patent Publication No. 20070185012; the content of each of which is incorporated herein by reference in their entirety.

[0747] Therapeutic agents that may be used in combination therapy with the AAV particles comprising modulatory polynucleotides comprising a nucleic acid sequence encoding the siRNA molecules of the present invention may be hormones or variants that can protect neuronal loss, such as adrenocorticotropic hormone (ACTH) or fragments thereof (e.g., U.S. Patent Publication No. 20130259875); Estrogen (e.g., U.S. Pat. Nos. 6,334,998 and 6,592,845); the content of each of which is incorporated herein by reference in their entirety.

[0748] Neurotrophic factors may be used in combination therapy with the AAV particles comprising modulatory polynucleotides comprising a nucleic acid sequence encoding the siRNA molecules of the present invention for treating ALS. Generally, a neurotrophic factor is defined as a substance that promotes survival, growth, differentiation, proliferation and/or maturation of a neuron, or stimulates increased activity of a neuron. In some embodiments, the present methods further comprise delivery of one or more trophic factors into the subject in need of treatment. Trophic factors may include, but are not limited to, IGF-I, GDNF, BDNF, CTNF, VEGF, Colivelin, Xaliproden, Thyrotrophin-releasing hormone and ADNF, and variants thereof.

[0749] In one aspect, the vector, e.g., AAV particle, encoding the nucleic acid sequence for the at least one siRNA duplex targeting the SOD1 gene may be co-administered with AAV particles expressing neurotrophic factors such as AAV-IGF-I (Vincent et al., Neuromolecular medicine, 2004, 6, 79-85; the content of which is incorporated herein by reference in its entirety) and AAV-GDNF (Wang et al., J Neurosci., 2002, 22, 6920-6928; the content of which is incorporated herein by reference in its entirety).

[0750] In some embodiments, the composition of the present invention for treating ALS is administered to the subject in need intravenously, intramuscularly, subcutaneously, intraperitoneally, intrathecally and/or intraventricularly, allowing the siRNA molecules or vectors comprising the siRNA molecules to pass through one or both the blood-brain barrier and the blood spinal cord barrier. In some aspects, the method includes administering (e.g., intraventricularly administering and/or intrathecally administering) directly to the central nervous system (CNS) of a subject (using, e.g., an infusion pump and/or a delivery scaffold) a therapeutically effective amount of a composition comprising AAV particles comprising modulatory polynucleotides comprising a nucleic acid sequence encoding the siRNA molecules of the present invention. The vectors may be used to silence or suppress SOD1 gene expression, and/or reducing one or more symptoms of ALS in the subject such that ALS is therapeutically treated.

[0751] In certain aspects, the symptoms of ALS include, but are not limited to, motor neuron degeneration, muscle weakness, muscle atrophy, the stiffness of muscle, difficulty in breathing, slurred speech, fasciculation development, frontotemporal dementia and/or premature death are improved in the subject treated. In other aspects, the composition of the present invention is applied to one or both of the brain and the spinal cord. In other aspects, one or both of muscle coordination and muscle function are improved. In other aspects, the survival of the subject is prolonged.

[0752] In one embodiment, administration of the AAV particles comprising modulatory polynucleotides comprising a nucleic acid sequence encoding the siRNA molecules of the present invention, to a subject may lower mutant SOD1 in the CNS of a subject. In another embodiment, administration of the AAV particles, to a subject may lower wild-type SOD1 in the CNS of a subject. In yet another embodiment, administration of the AAV particles, to a subject may lower both mutant SOD1 and wild-type SOD1 in the CNS of a subject. The mutant and/or wild-type SOD1 may be lowered by about 30%, 40%, 50%, 60%, 70%, 80%, 85%, 90%, 95% and 100%, or at least 20-30%, 20-40%, 20-50%, 20-60%, 20-70%, 20-80%, 20-90%, 20-95%, 20-100%, 30-40%, 30-50%, 30-60%, 30-70%, 30-80%, 30-90%, 30-95%, 30-100%, 40-50%, 40-60%, 40-70%, 40-80%, 40-90%, 40-95%, 40-100%, 50-60%, 50-70%, 50-80%, 50-90%, 50-95%, 50-100%, 60-70%, 60-80%, 60-90%, 60-95%, 60-100%, 70-80%, 70-90%, 70-95%, 70-100%, 80-90%, 80-95%, 80-100%, 90-95%, 90-100% or 95-100% in the CNS, a region of the CNS, or a specific cell of the CNS of a subject. As a non-limiting example, the AAV particles may lower the expression of wild-type SOD1 by at least 50% in the motor neurons (e.g., ventral horn motor neurons) and/or astrocytes. As another non-limiting example, the AAV particles may lower the expression of mutant SOD1 by at least 50% in the motor neurons (e.g., ventral horn motor neurons) and/or astrocytes. As yet another non-limiting example, the AAV particles may lower the expression of wild-type SOD1 and mutant SOD1 by at least 50% in the motor neurons (e.g., ventral horn motor neurons) and/or astrocytes.

[0753] In one embodiment, administration of the AAV particles, to a subject will reduce the expression of mutant and/or wild-type SOD1 in the spinal cord and the reduction of expression of the mutant and/or wild-type SOD1 will reduce the effects of ALS in a subject.

[0754] In one embodiment, the AAV particles may be administered to a subject who is in the early stages of ALS. Early stage symptoms include, but are not limited to, muscles which are weak and soft or stiff, tight and spastic, cramping and twitching (fasciculations) of muscles, loss of muscle bulk (atrophy), fatigue, poor balance, slurred words, weak grip, and/or tripping when walking. The symptoms may be limited to a single body region or a mild symptom may affect more than one region. As a non-limiting example, administration of the AAV particles may reduce the severity and/or occurrence of the symptoms of ALS.

[0755] In one embodiment, the AAV particles may be administered to a subject who is in the middle stages of ALS. The middle stage of ALS includes, but is not limited to, more widespread muscle symptoms as compared to the early stage, some muscles are paralyzed while others are weakened or unaffected, continued muscle twitchings (fasciculations), unused muscles may cause contractures where the joints become rigid, painful and sometimes deformed, weakness in swallowing muscles may cause choking and greater difficulty eating and managing saliva, weakness in breathing muscles can cause respiratory insufficiency which can be prominent when lying down, and/or a subject may have bouts of uncontrolled and inappropriate laughing or crying (pseudobulbar affect). As a non-limiting example, administration of the AAV particles may reduce the severity and/or occurrence of the symptoms of ALS.

[0756] In one embodiment, the AAV particles may be administered to a subject who is in the late stages of ALS. The late stage of ALS includes, but is not limited to, voluntary muscles which are mostly paralyzed, the muscles that help move air in and out of the lungs are severely compromised, mobility is extremely limited, poor respiration may cause fatigue, fuzzy thinking, headaches and susceptibility to infection or diseases (e.g., pneumonia), speech is difficult and eating or drinking by mouth may not be possible.

[0757] In one embodiment, the AAV particles may be used to treat a subject with ALS who has a C9orf72 mutation.

[0758] In one embodiment, the AAV particles may be used to treat a subject with ALS who has TDP-43 mutations.

[0759] In one embodiment, the AAV particles may be used to treat a subject with ALS who has FUS mutations.
[0760] In one embodiment, the AAV particle of the present invention comprises an AAVrh10 capsid and a self-complementary AAV viral genome comprising an H1 promoter, a stuffer sequence originating from a pLKO.1 lentiviral vector and a SOD1 targeting payload.
[0761] In one embodiment, the AAV particle of the present invention comprises an AAV2 capsid and a self-complementary AAV viral genome.
[0762] In one embodiment, the AAV particle of the present invention comprises an AAV2 capsid and a self-complementary AAV viral genome comprising an H1 promoter, a stuffer sequence originating from a pLKO.1 lentiviral vector and a SOD1 targeting payload.

### V. Definitions

[0763] Unless stated otherwise, the following terms and phrases have the meanings described below. The definitions are not meant to be limiting in nature and serve to provide a clearer understanding of certain aspects of the present invention.

[0764] As used herein, the term “nucleic acid”, “polynucleotide” and ‘oligonucleotide” refer to any nucleic acid polymers composed of either polydeoxyribonucleotides (containing 2-deoxy-D-ribose), or polyribonucleotides (containing D-ribose), or any other type of polynucleotide which is an N glycoside of a purine or pyrimidine base, or modified purine or pyrimidine bases. There is no intended distinction in length between the term “nucleic acid”, “polynucleotide” and “oligonucleotide”, and these terms will be used interchangeably. These terms refer only to the primary structure of the molecule. Thus, these terms include double- and single-stranded DNA, as well as double- and single stranded RNA.

[0765] As used herein, the term “RNA” or “RNA molecule” or “ribonucleic acid molecule” refers to a polymer of ribonucleotides; the term “DNA” or “DNA molecule” or “deoxyribonucleic acid molecule” refers to a polymer of deoxyribonucleotides. DNA and RNA can be synthesized naturally, e.g., by DNA replication and transcription of DNA, respectively; or be chemically synthesized. DNA and RNA can be single-stranded (i.e., ssRNA or ssDNA, respectively) or multi-stranded (e.g., double stranded, i.e., dsRNA and dsDNA, respectively). The term “mRNA” or “messenger RNA”, as used herein, refers to a single stranded RNA that encodes the amino acid sequence of one or more polypeptide chains.

[0766] As used herein, the term “RNA interfering” or “RNAi” refers to a sequence specific regulatory mechanism mediated by RNA molecules which results in the inhibition or interfering or “silencing” of the expression of a corresponding protein-coding gene. RNAi has been observed in many types of organisms, including plants, animals and fungi. RNAi occurs in cells naturally to remove foreign RNAs (e.g., viral RNAs). Natural RNAi proceeds via fragments cleaved from free dsRNA which direct the degradative mechanism to other similar RNA sequences. RNAi is controlled by the RNA-induced silencing complex (RISC) and is initiated by short/small dsRNA molecules in cell cytoplasm, where they interact with the catalytic RISC component argonaute. The dsRNA molecules can be introduced into cells exogenously. Exogenous dsRNA initiates RNAi by activating the ribonuclease protein Dicer, which binds and cleaves dsRNAs to produce double-stranded fragments of 21-25 base pairs with a few unpaired overhang bases on each end. These short double stranded fragments are called small interfering RNAs (siRNAs).

[0767] As used herein, the terms “short interfering RNA.” “small interfering RNA” or “siRNA” refer to an RNA molecule (or RNA analog) comprising between about 5-60 nucleotides (or nucleotide analogs) which is capable of directing or mediating RNAi. Preferably, a siRNA molecule comprises between about 15-30 nucleotides or nucleotide analogs, such as between about 16-25 nucleotides (or nucleotide analogs), between about 18-23 nucleotides (or nucleotide analogs), between about 19-22 nucleotides (or nucleotide analogs) (e.g., 19, 20, 21 or 22 nucleotides or nucleotide analogs), between about 19-25 nucleotides (or nucleotide analogs), and between about 19-24 nucleotides (or nucleotide analogs). The term “short” siRNA refers to a siRNA comprising 5-23 nucleotides, preferably 21 nucleotides (or nucleotide analogs), for example, 19, 20, 21 or 22 nucleotides. The term “long” siRNA refers to a siRNA comprising 24-60 nucleotides, preferably about 24-25 nucleotides, for example, 23, 24, 25 or 26 nucleotides. Short siRNAs may, in some instances, include fewer than 19 nucleotides, e.g., 16, 17 or 18 nucleotides, or as few as 5 nucleotides, provided that the shorter siRNA retains the ability to mediate RNAi. Likewise, long siRNAs may, in some instances, include more than 26 nucleotides, e.g., 27, 28, 29, 30, 35, 40, 45, 50, 55, or even 60 nucleotides, provided that the longer siRNA retains the ability to mediate RNAi or translational repression absent further processing, e.g., enzymatic processing, to a short siRNA. siRNAs can be single stranded RNA molecules (ss-siRNAs) or double stranded RNA molecules (ds-siRNAs) comprising a sense strand and an antisense strand which hybridized to form a duplex structure called siRNA duplex.

[0768] As used herein, the term “the antisense strand” or “the first strand” or “the guide strand” of a siRNA molecule refers to a strand that is substantially complementary to a section of about 10-50 nucleotides, e.g., about 15-30, 16-25, 18-23 or 19-22 nucleotides of the mRNA of the gene targeted for silencing. The antisense strand or first strand has sequence sufficiently complementary to the desired target mRNA sequence to direct target-specific silencing, e.g., complementarity sufficient to trigger the destruction of the desired target mRNA by the RNAi machinery or process.

[0769] As used herein, the term “the sense strand” or “the second strand” or “the passenger strand” of a siRNA molecule refers to a strand that is complementary to the antisense strand or first strand. The antisense and sense strands of a siRNA molecule are hybridized to form a duplex structure. As used herein, a “siRNA duplex” includes a siRNA strand having sufficient complementarity to a section of about 10-50 nucleotides of the mRNA of the gene targeted for silencing and a siRNA strand having sufficient complementarity to form a duplex with the other siRNA strand.

[0770] As used herein, the term “complementary” refers to the ability of polynucleotides to form base pairs with one another. Base pairs are typically formed by hydrogen bonds between nucleotide units in antiparallel polynucleotide strands. Complementary polynucleotide strands can form base pair in the Watson-Crick manner (e.g., A to T, A to U, C to G), or in any other manner that allows for the formation of duplexes. As persons skilled in the art are aware, when using RNA as opposed to DNA, uracil rather than thymine is the base that is considered to be complementary to adenosine. However, when a U is denoted in the context of the present invention, the ability to substitute a T is implied, unless otherwise stated. Perfect complementarity or 100% complementarity refers to the situation in which each nucleotide unit of one polynucleotide strand can form hydrogen bond with a nucleotide unit of a second polynucleotide strand. Less than perfect complementarity refers to the situation in which some, but not all, nucleotide units of two strands can form hydrogen bond with each other. For example, for two 20-mers, if only two base pairs on each strand can form hydrogen bond with each other, the polynucleotide strands exhibit 10% complementarity. In the same example, if 18 base pairs on each strand can form hydrogen bonds with each other, the polynucleotide strands exhibit 90% complementarity.

[0771] As used herein, the term “substantially complementary” means that the siRNA has a sequence (e.g., in the antisense strand) which is sufficient to bind the desired target mRNA, and to trigger the RNA silencing of the target mRNA.

[0772] As used herein, “targeting” means the process of design and selection of nucleic acid sequence that will hybridize to a target nucleic acid and induce a desired effect.

[0773] The term “gene expression” refers to the process by which a nucleic acid sequence undergoes successful transcription and in most instances translation to produce a protein or peptide. For clarity, when reference is made to measurement of “gene expression”, this should be understood to mean that measurements may be of the nucleic acid product of transcription, e.g., RNA or mRNA or of the amino acid product of translation, e.g., polypeptides or peptides. Methods of measuring the amount or levels of RNA. mRNA, polypeptides and peptides are well known in the art.

[0774] As used herein, the term “mutation” refers to any changing of the structure of a gene, resulting in a variant (also called “mutant”) form that may be transmitted to subsequent generations. Mutations in a gene may be caused by the alternation of single base in DNA, or the deletion, insertion, or rearrangement of larger sections of genes or chromosomes.

[0775] As used herein, the term “vector” means any molecule or moiety which transports, transduces or otherwise acts as a carrier of a heterologous molecule such as the siRNA molecule of the invention. A “viral genome” or “vector genome” or “viral vector” refers to a sequence which comprises one or more polynucleotide regions encoding or comprising a molecule of interest, e.g., a transgene, a polynucleotide encoding a polypeptide or multi-polypeptide or a modulatory nucleic acid such as small interfering RNA (siRNA). Viral genomes are commonly used to deliver genetic materials into cells. Viral genomes are often modified for specific applications. Types of viral genome sequence include retroviral viral genome sequences, lentiviral viral genome sequences, adenoviral viral genome sequences and adeno-associated viral genome sequences.

[0776] The term “adeno-associated virus” or “AAV” as used herein refers to any vector which comprises or derives from components of an adeno-associated vector and is suitable to infect mammalian cells, preferably human cells. The term AAV vector typically designates an AAV type viral particle or virion comprising a payload. The AAV vector may be derived from various serotypes, including combinations of serotypes (i.e., “pseudotyped” AAV) or from various genomes (e.g., single stranded or self-complementary). In addition, the AAV vector may be replication defective and/or targeted.

[0777] As used herein, the phrase “inhibit expression of a gene” means to cause a reduction in the amount of an expression product of the gene. The expression product can be a RNA molecule transcribed from the gene (e.g., an mRNA) or a polypeptide translated from an mRNA transcribed from the gene. Typically a reduction in the level of an mRNA results in a reduction in the level of a polypeptide translated therefrom. The level of expression may be determined using standard techniques for measuring mRNA or protein.

[0778] As used herein, the term “in vitro” refers to events that occur in an artificial environment, e.g., in a test tube or reaction vessel, in cell culture, in a Petri dish, etc., rather than within an organism (e.g., animal, plant, or microbe).

[0779] As used herein, the term “in vivo” refers to events that occur within an organism (e.g., animal, plant, or microbe or cell or tissue thereof).

[0780] As used herein, the term “modified” refers to a changed state or structure of a molecule of the invention. Molecules may be modified in many ways including chemically, structurally, and functionally.

[0781] As used herein, the term “synthetic” means produced, prepared, and/or manufactured by the hand of man. Synthesis of polynucleotides or polypeptides or other molecules of the present invention may be chemical or enzymatic.

[0782] As used herein, the term “transfection” refers to methods to introduce exogenous nucleic acids into a cell. Methods of transfection include, but are not limited to, chemical methods, physical treatments and cationic lipids or mixtures. The list of agents that can be transfected into a cell is large and includes, but is not limited to, siRNA, sense and/or anti-sense sequences, DNA encoding one or more genes and organized into an expression plasmid, proteins, protein fragments, and more.

[0783] As used herein, “off target” refers to any unintended effect on any one or more target, gene, or cellular transcript.

[0784] As used herein, the phrase “pharmaceutically acceptable” is employed herein to refer to those compounds, materials, compositions, and/or dosage forms which are, within the scope of sound medical judgment, suitable for use in contact with the tissues of human beings and animals without excessive toxicity, irritation, allergic response, or other problem or complication, commensurate with a reasonable benefit/risk ratio.

[0785] As used herein, the term “effective amount” of an agent is that amount sufficient to effect beneficial or desired results, for example, clinical results, and, as such, an “effective amount” depends upon the context in which it is being applied. For example, in the context of administering an agent that treats ALS, an effective amount of an agent is, for example, an amount sufficient to achieve treatment, as defined herein, of ALS, as compared to the response obtained without administration of the agent.

[0786] As used herein, the term “therapeutically effective amount” means an amount of an agent to be delivered (e.g., nucleic acid, drug, therapeutic agent, diagnostic agent, prophylactic agent, etc.) that is sufficient, when administered to a subject suffering from or susceptible to an infection, disease, disorder, and/or condition, to treat, improve symptoms of, diagnose, prevent, and/or delay the onset of the infection, disease, disorder, and/or condition.

[0787] As used herein, the term “subject” or “patient” refers to any organism to which a composition in accordance with the invention may be administered, e.g., for experimental, diagnostic, prophylactic, and/or therapeutic purposes. Typical subjects include animals (e.g., mammals such as mice, rats, rabbits, non-human primates such as chimpanzees and other apes and monkey species, and humans) and/or plants.

[0788] As used herein, the term “preventing” or “prevention” refers to delaying or forestalling the onset, development or progression of a condition or disease for a period of time, including weeks, months, or years.

[0789] The term “treatment” or “treating,” as used herein, refers to the application of one or more specific procedures used for the cure or amelioration of a disease. In certain embodiments, the specific procedure is the administration of one or more pharmaceutical agents. In the context of the present invention, the specific procedure is the administration of one or more siRNA molecules.

[0790] As used herein, the term “amelioration” or “ameliorating” refers to a lessening of severity of at least one indicator of a condition or disease. For example, in the context of neurodegeneration disorder, amelioration includes the reduction of neuron loss.

[0791] As used herein, the term “administering” refers to providing a pharmaceutical agent or composition to a subject.

[0792] As used herein, the term “neurodegeneration” refers to a pathologic state which results in neural cell death. A large number of neurological disorders share neurodegeneration as a common pathological state. For example, Alzheimer's disease, Parkinson's disease, Huntington's disease, and amyotrophic lateral sclerosis (ALS) all cause chronic neurodegeneration, which is characterized by a slow, progressive neural cell death over a period of several years, whereas acute neurodegeneration is characterized by a sudden onset of neural cell death as a result of ischemia, such as stroke, or trauma, such as traumatic brain injury, or as a result of axonal transection by demyelination or trauma caused, for example, by spinal cord injury or multiple sclerosis. In some neurological disorders, mainly one type of neuronal cell is degenerative, for example, medium spiny neuron degeneration in early ALS.

### VI. Equivalents and Scope

[0793] Those skilled in the art will recognize, or be able to ascertain using no more than routine experimentation, many equivalents to the specific embodiments in accordance with the invention described herein. The scope of the present invention is not intended to be limited to the above Description, but rather is as set forth in the appended claims.

[0794] In the claims, articles such as “a,” “an,” and “the” may mean one or more than one unless indicated to the contrary or otherwise evident from the context. Claims or descriptions that include “or” between one or more members of a group are considered satisfied if one, more than one, or all of the group members are present in, employed in, or otherwise relevant to a given product or process unless indicated to the contrary or otherwise evident from the context. The invention includes embodiments in which exactly one member of the group is present in, employed in, or otherwise relevant to a given product or process. The invention includes embodiments in which more than one, or the entire group members are present in, employed in, or otherwise relevant to a given product or process.

[0795] It is also noted that the term “comprising” is intended to be open and permits but does not require the inclusion of additional elements or steps. When the term “comprising” is used herein, the term “consisting of” is thus also encompassed and disclosed.

[0796] Where ranges are given, endpoints are included. Furthermore, it is to be understood that unless otherwise indicated or otherwise evident from the context and understanding of one of ordinary skill in the art, values that are expressed as ranges can assume any specific value or subrange within the stated ranges in different embodiments of the invention, to the tenth of the unit of the lower limit of the range, unless the context clearly dictates otherwise.

[0797] In addition, it is to be understood that any particular embodiment of the present invention that falls within the prior art may be explicitly excluded from any one or more of the claims. Since such embodiments are deemed to be known to one of ordinary skill in the art, they may be excluded even if the exclusion is not set forth explicitly herein. Any particular embodiment of the compositions of the invention (e.g., any antibiotic, therapeutic or active ingredient; any method of production; any method of use, etc.) can be excluded from any one or more claims, for any reason, whether or not related to the existence of prior art.

[0798] It is to be understood that the words which have been used are words of description rather than limitation, and that changes may be made within the purview of the appended claims without departing from the true scope and spirit of the invention in its broader aspects.

[0799] While the present invention has been described at some length and with some particularity with respect to the several described embodiments, it is not intended that it should be limited to any such particulars or embodiments or any particular embodiment, but it is to be construed with references to the appended claims so as to provide the broadest possible interpretation of such claims in view of the prior art and, therefore, to effectively encompass the intended scope of the invention.

### VII. Examples

### Example 1. SOD1 siRNA Design, Synthesis and Analysis

[0800] SOD1 siRNA Design

[0801] siRNA design is carried out to identify siRNAs targeting human SOD1 gene. The design uses the SOD1 transcripts for human (Genebank access NO. NM_000454.4 (SEQ ID NO: 1254).

[0802] The siRNA duplexes are designed to have 100% identity to the human SOD1 transcript for positions 2-18 of the antisense strand, and partial or 100% identity to the non-human primate SOD1 transcript for positions 2-18 of the antisense strand. In all siRNA duplexes, position 1 of the antisense strand is engineered to have a U and position 19 of the sense strand is engineered to have a C, in order to unpair the duplex at this position.

SOD1 siRNA Sequence Selection and Synthesis

[0803] Based on predicted selectivity of the antisense strand for human, cynomolgus and rhesus SOD1 genes, and lack of match of the seed sequence at positions 2-7 of the antisense strand to human sequences in miRBase20.0, sense human SOD1 derived oligonucleotides are synthesized and formed into duplexes. Examples of SOD1 derived oligonucleotides and duplexes can be found in Table 3 of International Patent Application No. PCT/US2015/060562, the contents of which is herein incorporated by reference in its entirety. The siRNA duplexes are then tested for in vitro inhibitory activity on endogenous SOD1 gene expression (SOD1 mRNA levels). The oligoribonucleotides are synthesized as described in Example 1, SOD1 siRNA synthesis, of International Patent Application No. PCT/US2015/060562, the contents of which is herein incorporated by reference in its entirety.

In Vitro Screening of SOD1 siRNAs

[0804] Human SOD1 targeting siRNAs are assayed for inhibition of endogenous SOD1 expression in HeLa cells, using the bDNA (branched DNA) assay to quantify SOD1 mRNA. Results from two dose assays are used to select a subset of SOD1 dsRNA duplexes for dose response experiments in 4 types of cultured cells to calculate IC₅₀'s.

### Cell Culture, Transfection and Assays

[0805] HeLa cells are obtained from ATCC (ATCC in Partnership with LGC Standards, Wesel, Germany) and cultured in HAM's F-12 Medium (Biochrom GmbH, Berlin, Germany) supplemented to contain 10% fetal calf serum (Ultra-low IgG from GIBCO/Life Technologies) and 1% Pen/Strep (Biochrom GmbH, Berlin, Germany) at 37° C. in an atmosphere with 5% CO₂ in a humidified incubator.

[0806] For transfection with siRNA, HeLa cells are seeded at a density of 19,000-20,000 cells/well in 96-well plates. Transfection of siRNA is carried out with Lipofectamine 2000 (Invitrogen/Life Technologies) according to the manufacturer's instructions. For the two-dose screen, SOD1 siRNA concentrations of 1 nM or 0.1 nM are used. Dose response experiments are done with SOD1 siRNA concentrations of 10, 2.5, 0.6, 0.16, 0.039, 0.0098, 0.0024, 0.0006, 0.00015, and 0.000038 nM. Control wells are transfected with luciferase siRNA, Aha-1 siRNA, PLGF siRNA, or a control mix of unrelated siRNAs.

[0807] After a 24-hour incubation with siRNA, media is removed and cells are lysed and prepped for analysis by QuantiGene 2.0 and then bDNA data analysis as described in Example 2 of International Patent Application No. PCT/US2015/060562, the contents of which is herein incorporated by reference in its entirety.

### Example 2. In Vitro Screen of Selected SOD1 siRNAs Against Endogenous SOD1 mRNA Expression in SH-SY5Y Cells, U87 Cells and Primary Human Astrocytes

[0808] SH-SY5Y cells are obtained from ATCC (ATCC in Partnership with LGC Standards, Wesel, Germany) and cultured in Dulbecco's MEM (Biochrom GmbH. Berlin, Germany) supplemented to contain 15% FCS (Ultra-low IgG from GIBCO/Life Technologies), 1% L-Glutamine (Biochrom GmbH, Berlin, Germany) and 1% Pen/Strep (Biochrom GmbH, Berlin, Germany) at 37° C. in an atmosphere with 5% C02 in a humidified incubator.

[0809] U87MG cells are obtained from ATCC (ATCC in Partnership with LGC Standards, Wesel, Germany) and cultured in ATCC-formulated Eagle's Minimum Essential Medium (ATCC in Partnership with LGC Standards, Wesel, Germany) supplemented to contain 10% FCS (Ultra-low IgG from GIBCO/Life Technologies) and 1% Pen/Strep (Biochrom GmbH, Berlin, Germany) at 37° C. in an atmosphere with 5% CO₂ in a humidified incubator.

[0810] Primary human astrocytes are obtained from LONZA (Lonza Sales Ltd, Basel, Switzerland) and cultured in ABM Basal Medium (Lonza Sales Ltd, Basel, Switzerland) supplemented with AGM SingleQuot Kit (Lonza Sales Ltd, Basel, Switzerland) at 37° C. in an atmosphere with 5% C02 in a humidified incubator.

[0811] Transfection of SH-SY5Y cells, U87MG cells and primary human astrocytes with selected siRNAs, and quantitation of SOD1 and GAPDH mRNA levels with bDNA are performed in a similar manner to that described for HeLa cells, except that the transfection reagents are Lipofectamine2000 (Invitrogen/Life Technologies) for SH-SY5Y cells, RNAiMAX (Invitrogen/Life Technologies) for U87 cells, and Lipofectamine2000 (Invitrogen/Life Technologies) for primary human astrocytes.

### Example 3. siRNA Targeting SOD1

[0812] The passenger-guide strand duplexes of the SOD1 siRNA found to be efficacious are engineered into expression vectors and transfected into cells of the central nervous system or neuronal cell lines. Even though overhang utilized in the siRNA knockdown study is a canonical dTdT for siRNA, the overhang in the constructs may comprise any dinucleotide overhang.

[0813] The cells used may be primary cells or derived from induced pluripotent stem cells (iPS cells).

[0814] SOD1 knockdown is then measured and deep sequencing performed to determine the exact passenger and guide strand processed from each construct administered in the expression vector.

[0815] A guide to passenger strand ratio is calculated to determine the efficiency of knockdown, e.g., of RNA Induced Silencing Complex (RISC) processing.

[0816] The N-terminus is sequenced to determine the cleavage site and to determine the percent homogeneous cleavage of the target. It is expected that cleavage will be higher than 90 percent.

[0817] HeLa cells are co-transfected in a parallel study to analyze in vitro knockdown of SOD1. A luciferase construct is used as a control to determine off-target effects.

[0818] Deep sequencing is again performed.

### Example 4. SOD1 siRNA Constructs in AAV-miRNA Vectors

[0819] The passenger-guide strand duplexes of the SOD1 siRNA are engineered into AAV-miRNA expression vectors. The construct from ITR to ITR, recited 5′ to 3′, comprises a mutant ITR, a promoter (either a CMV (which includes an SV40 intron or a beta-globin intron), a U6, H1 or the CBA promoter (which includes a CMVie enhancer, a CB promoter and an SV40 intron or a beta-globin intron)), the passenger and guide strand (with a loop between the passenger and guide strand, a 5′ flanking region before the passenger strand and a 3′ flanking region after the guide strand, a rabbit globin polyA and wild type ITR. In vitro and in vivo studies are performed to test the efficacy of the AAV-miRNA expression vectors.

[0820] Exemplary ITR to ITR sequences are shown in Table 22. These sequences comprise either a CBA promoter with a beta-globin intron or a CMV promoter with a beta globin (β-Globin) intron as well as a modulatory polynucleotide including a 5′ flanking region, passenger strand, loop, guide strand and a 3′ flanking region.

TABLE 22
ITR to ITR Sequences

| | | | Modulatory | Modulatory |
|---|---|---|---|---|
| Construct | | ITR to ITR | Polynucleotide Name | Polynucleotide |
| Name | ITR to ITR Promoter and Intron | SEQ ID NO | Description | SEQ ID |
| VOYSOD1 | CBA promoter; β-Globin intron | 1414 | VOYmiR-127.860 | 1326 |
| VOYSOD2 | CMV promoter; β-Globin intron | 1415 | VOYmiR-127.860 | 1326 |
| VOYSOD3 | CBA promoter; β-Globin intron | 1416 | VOYmiR-114.861 | 1327 |
| VOYSOD4 | CMV promoter; β-Globin intron | 1417 | VOYmiR-114.861 | 1327 |

### Example 5. Activity of Constructs

### HeLa Cells

[0821] SOD1 siRNA constructs and a control are transfected in HeLa cells at a MOI of 1e4 vg/cell, 1e3 vg/cell, or 1e2 vg/cell to test the activity of the constructs. After 48-72 hours the endogenous mRNA expression is evaluated using methods known in the art.

### HEK293 Cells

[0822] SOD1 siRNA constructs and a control are transfected into HEK293 cells at a MOI of 1e4 vg/cell, 1e3 vg/cell, or 1e2 vg/cell to test the activity of the constructs. After 24-48 hours the endogenous mRNA expression is evaluated using methods known in the art.

### Human Motor Neuron Progenitors (HMNPs)

[0823] SOD1 siRNA constructs and a control are transfected into human motor neuron progenitor (HMNP) cells at a MOI of 1e4 vg/cell, 1e3 vg/cell, or 1e2 vg/cell to test the activity of the constructs. After 48 hours the endogenous mRNA expression is evaluated using methods known in the art.

### U251MG

[0824] SOD1 siRNA constructs and a control are transfected into the human astrocyte cell line U251MG at a MOI of 1e4 vg/cell, 1e3 vg/cell, or 1e2 vg/cell to test the activity of the constructs. After 48-60 hours the endogenous mRNA expression is evaluated using methods known in the art.

### Human Astrocyte (HA)

[0825] SOD1 siRNA constructs and a control are transfected into primary human astrocyte cells at a MOI of 1e4 vg/cell, 1e3 vg/cell, or 1e2 vg/cell to test the activity of the constructs. After 48-60 hours the endogenous mRNA expression is evaluated using methods known in the art.

### Example 6. SOD1 Knock-Down In Vivo

[0826] Self-complementary pri-miRNAs are packaged in AAV and are administered by a 10 minute intrastriatal infusion. Female or male Tg(SOD1)3Cje/J mice (Jackson Laboratory, Bar Harbor, Me.), which express human SOD1, and of approximately 20-30 g body weight, receive unilateral injections of 5 uL test article which is targeted to the striatum (anteroposterior+0.5 mm, mediolateral+2 mm, relative to bregma; dorsoventral 3.8 mm, relative to skull surface). Test articles are injected (5 animals per test article) at 0.5 uL/min. using pre-filled, pump-regulated Hamilton micro-syringes (1701 model, 10 μl) with 33 gauge needles. At 1, 2, 3, 4 or 6 weeks following the injection, animals are sacrificed, brains are removed, and ipsilateral striata encompassing the infusion site from a 1 mm coronal slab, as well as striatal tissue from the adjacent 1 mm coronal slabs are dissected and flash frozen. Mouse tissue samples are lysed, and human SOD1 protein levels, and SOD1 and mouse GAPDH (mGAPDH) mRNA levels are quantified. SOD1 protein levels are quantified by ELISA (eBioscience (Affymetrix, San Diego, Calif.)), and total protein levels are quantified by BCA analysis (ThermoFisher Scientific, Waltham, Mass.). For each tissue sample, the level of SOD1 protein normalized to total protein is calculated as an average of 2 determinations. These normalized SOD1 protein levels are further normalized to the vehicle group, then averaged to obtain a group (treatment) average. SOD1 and mGAPDH mRNA levels are quantified by qRT-PCR. For each tissue sample, the ratio of SOD1/mGAPDH (normalized SOD mRNA level) is calculated as an average of 3 determinations. These ratios are then averaged to obtain a group (treatment) average. These group averages are further normalized to the vehicle group.

[0827] In non-human primates, test articles (1×10¹³-3×10¹³ vg of pri-miRNA packaged in AAV) or vehicle are administered by intrathecal lumbar bolus. Female cynomolgus monkeys (Macaca fascicularis, CR Research Model Houston, Houston, Tex.) of approximately 2.5-8.5 kg body weight, receive implanted single intrathecal catheters with the tip of the catheter located at the lumbar spine. Test articles are administered (4 animals per test article) three 1 mL bolus injections (1 mL/minute), at approximately 60 minute intervals. At 4 to 6 weeks following the administration, animals are sacrificed, and selected tissues harvested for bioanalytical and histological evaluation. SOD1 protein and mRNA levels are assessed for suppression after treatment with pri-miRNA packaged in AAV-DJ with a CBA promoter, relative to the vehicle group.

### Example 7. SOD1 Knock-Down In Vivo hSOD1 Transgenic Alice

[0828] Self-complementary pri-miRNAs targeting SOD1 as described herein were packaged in AAV-DJ. Female or male Tg(SOD1)3Cje/J mice (Jackson Laboratory, Bar Harbor, Me.) (n=1-13/group), which express human SOD1 received a single unilateral injection of 5 uL vector comprising self-complementary pri-miRNA targeting SOD1 (VOYmir102.860, VOYmir104.861, VOYmir109.861, VOYmir109.866, VOYmir116.860, VOYmir116.866, VOYmir127.860, VOYmir127.866, VOYmir109.860, VOYmir114.861, VOYmir114.860, or VOYmir102.861; Table 23 and Table 24) packaged in AAV-DJ, or vehicle which was targeted to the striatum. Test articles were injected at 0.5 uL/min with 3.1 to 6.4×10¹² vg/ml vector concentrations (total doses were 1.5 to 3.2×10¹⁰ vg) using pre-filled, pump-regulated Hamilton micro-syringes (1701 model, 10 μl) with 33-gauge needles. At 22 (n=6) or 29 (n=5 to 7) days following the injection, animals were sacrificed, brains were removed, and ipsilateral striata encompassing the infusion site from a 1 mm coronal slab, as well as striatal tissue from the adjacent 1 mm coronal slabs were dissected and flash frozen. The striatum tissue samples from adjacent 1 mm coronal slabs were pooled for each hemisphere and used for hSOD1 mRNA quantification. The striatum tissue samples from the infusion site were collected and used for hSOD1 protein quantification. SOD1 and mGAPDH mRNA levels were quantified by qRT-PCR. Total RNA was extracted from striatal tissue samples using the RNeasy Mini Kit according to the manufacturer's protocol (QIAGEN). Complementary DNA synthesis was performed by reverse transcription using the High-Capacity cDNA Reverse Transcription Kit (Applied Biosystems). All TaqMan assays and master mixes were ordered from Life Technologies and used according to the manufacturer's recommendations. RT-qPCR was performed using the LightCycler 48011 (Roche) or the CFX384 real-time system (BIO-RAD) and data were analyzed with the ΔΔCT method. hSOD1 mRNA levels were normalized to mGAPDH mRNA levels, and then further normalized to the vehicle control group. These group averages were calculated to obtain a group (treatment) average. SOD1 protein levels were quantified by ELISA (eBioscience (Affymetrix, San Diego, Calif.)), and total protein levels were quantified by BCA analysis (ThermoFisher Scientific, Waltham, Mass.). The SOD1 protein levels were normalized to the vehicle group, then averaged to obtain a group (treatment) average. Along with the dose, the results for days 22 and 29 are shown below in Table 23 (qRT-PCR mRNA) and Table 24 (ELISA protein).

TABLE 23
Modulatory Polynucleotide, Dose, and qRT-PCR mRNA Results

| | |
|---|---|
| | SOD1 mRNA |
| Modulatory | normalized to GAPDH |
| Polynucleotide | (% of Vehicle ± SD) |

| Name | Dose | Day 22 | Day 29 |
|---|---|---|---|
| VOYmir102.860 | 1.9E10 | 92 ± 25 | 66 ± 13 |
| VOYmir104.861 | 2.3E10 | 94 ± 20 | 66 ± 8 |
| VOYmir109.861 | 2.1E10 | 74 ± 3 | 65 ± 7 |
| VOYmir109.866 | 2.4E10 | 93 ± 10 | 87 ± 16 |
| VOYmir116.860 | 2.5E10 | 68 ± 10 | 62 ± 13 |
| VOYmir116.866 | 2.8E10 | 83 ± 6 | 82 ± 9 |
| VOYmir127.860 | 2.9E10 | 47 ± 5 | 54 ± 32 |
| VOYmir127.866 | 3.2E10 | 98 ± 20 | 64 ± 8 |
| VOYmir109.860 | 1.7E10 | 64 ± 14 | 56 ± 8 |
| VOYmir114.861 | 3.2E10 | 58 ± 6 | 64 ± 5 |
| VOYmir114.860 | 1.5E10 | 78 ± 6 | 55 ± 14 |
| VOYmir102.861 | 1.9E10 | 77 ± 13 | 68 ± 15 |
| N/A (Vehicle only) | 0 | 100 ± 19 | 100 ± 9 |

TABLE 24
Modulatory Polynucleotide, Dose, and EL1SA Protein Results

| | |
|---|---|
| | SOD1 miRNA |
| Modulatory | normalized to Vehicle |
| Polynucleotide | (% of Vehicle ± SD) |

| Name | Dose | Day 22 | Day 29 |
|---|---|---|---|
| VOYmir102.860 | 1.9E10 | 90.3 ± 5.2 | 80.8 ± 3.6 |
| VOYmir104.861 | 2.3E10 | 88.8 ± 9.4 | 73.1 ± 5 |
| VOYmir109.861 | 2.1E10 | 103.7 ± 16.3 | 70.7 ± 2.5 |
| VOYmir109.866 | 2.4E10 | 129.8 ± 17.6 | 75.8 ± 6.9 |
| VOYmir116.860 | 2.5E10 | 103.4 ± 9.8 | 77.2 ± 5.9 |
| VOYmir116.866 | 2.8E10 | 94.0 ± 6.1 | 83.0 ± 4.2 |
| VOYmir127.860 | 2.9E10 | 75.3 ± 8.6 | 75.9 ± 14.4 |
| VOYmir127.866 | 3.2E10 | 87.8 ± 8.2 | 76.9 ± 5.9 |
| VOYmir109.860 | 1.7E10 | 89.2 ± 5.3 | 80.2 ± 3.7 |
| VOYmir114.861 | 3.2E1.0 | 86.1 ± 4.4 | 78.0 ± 3.6 |
| VOYmir114.860 | 1.5E10 | 81.4 ± 6.6 | 88.2 ± 5.5 |
| VOYmir102.861 | 1.9E10 | 87.5 ± 2.8 | 92.4 ± 5.2 |
| N/A (Vehicle only) | 0 | 100 ± 11.7 | 100 ± 7.8 |

[0829] VOYmiR127.860 and VOYmiR114.861 packaged in AAV-DJ resulted in the greatest SOD1 mRNA suppression of 53% (p<0.0001) and 42% (p<0.001) reduction at 22 days, respectively, and 46% (p<0.0001) and 36% (p<0.001) reduction at 29 days respectfully, relative to the vehicle group. VOYmiR127.860 and VOYmiR114.861 packaged in AAV-DJ also resulted in protein suppression of 25% (p<0.001) and 14% reduction at 22 days, respectively, and 24% (p<0.0001) and 22% (p<0.0001) reduction at 29 days, respectively, relative to the vehicle group.

[0830] Additionally, deep sequencing was performed for VOYmiR127.860 and VOYmiR114.861 packaged in AAV-DJ, from mouse striatum samples (n=2-3) 4 weeks after a single unilateral injection of 5 uL of vector at 0.5 ul/min, for a total dose of 2.9E10 vg for VOYmiR127.860 or 3.2E10 vg for VOYmiR114.861. In brief, total RNA from striatum was isolated using mirVana miRNA Isolation kit (Cat # AM1560, ThermoFisher Scientific, Waltham, Mass.). Small RNA sequencing libraries were prepared using Illumina TruSeq Small RNA library Prep Kit (Cat # RS-200-0012, Illumina, San Diego, Calif.), starting from 1 μg RNA, according to the manufacturer's protocol. Libraries were pooled and sequenced on the Illumina HiSeq2500. The results showed high guide: passenger ratios (99 for VOYmiR127.860 and 11.5 for VOYmiR114.861) demonstrating that the primary miRNA is processed primarily to the guide strand (the strand targeting SOD1 mRNA for RNAi-mediated reduction) with relatively low levels of the passenger strand. Low levels of guide and passenger strands relative to the total endogenous pool of miRNAs (0.3% for both VOYmiR127.860 and VOYmiR114.861) was also measured.

[0831] In an additional study, transgenic mice expressing human wild-type SOD1 (C57BL/6-Tg(SOD1)3Cje/J) (n=4-5 per group) were treated with self-complementary pri-miRNA targeting SOD (VOYmiR127.860 or VOYmiR114.861) packaged in AAVrh10, or vehicle by a single unilateral intrastriatal infusion of 5 ul of vector (1.6×10¹² vg/ml) at 0.5 ul/min, for a total dose of 8×10⁹ vg). Three weeks after dosing, striatal tissues from the site of administration were evaluated for SOD1 mRNA suppression by the same RT-qPCR method as described above. Treatment with VOYmiR127.860 packaged in AAVrh10 resulted in the suppression of SOD1 mRNA by 36±17.5% (average ±SD) (p<0.01). Treatment with VOYmiR11.861 packaged in AAVrh10 resulted in the suppression of SOD1 mRNA by 30±9.7% (average ±SD) (p<0.01).

### Non-Human Primates

[0832] In non-human primates, self-complementary pri-miRNA targeting SOD1 (VOYmiR127.860) packaged in AAVrh10 at 1.1×10¹³ vg/ml, or vehicle was administered by intrathecal lumbar infusion. Four female cynomolgus monkeys (Macaca fascicularis, CR Research Model Houston, Houston, Tex.) of approximately 2.5-8.5 kg body weight, received implanted single intrathecal catheters with the tip of the catheter located at the lumbar spine. Test articles were administered two 2.5 mL IT lumbar (L1) injections (over 20 minutes in the Trendelenburg position) 6 hours apart. The total dose administered was 5.4×10¹³ vg per animal. Tolerability as assessed by body weight, clinical signs, clinical pathology, cerebral spinal fluid (CSF) chemistry, and CSF total cell counts was evaluated, as well as neutralizing antibodies in serum and CSF before and after dosing, as described below. At four weeks following the administration, animals were sacrificed, and selected tissues were harvested for evaluation of SOD1 mRNA by RT-qPCR, co-detection of vector genomes (Vg) and cynomolgus SOD1 mRNA by duplex RNAscope in situ hybridization assay, vector genome levels by droplet digital PCR, precision and efficiency of pri-miRNA processing by deep sequencing, and histopathology, as described below.

[0833] All animals survived until the scheduled termination. There were no significant test article-related effects of VOYmiR127.860 packaged in AAVrh10 on body weight, clinical signs, clinical pathology (comprising serum chemistry, hematology, and coagulation on Day 15 and Day 29), cerebral spinal fluid (CSF) chemistry, or CSF total cell counts on Day 29.

[0834] Serum and CSF samples were evaluated for neutralizing antibodies at approximately one week prior to dosing, approximately Day 15 (serum only) and approximately Day 29 at the time of necropsy, using a functional in vitro assay that quantifies inhibition of AAVrh10.GFP (green fluorescent protein) infection using flow cytometric analysis. Nonhuman primates were pre-screened for absent or minimal circulating neutralizing antibodies in serum prior to enrollment into the study. Neutralizing antibodies were evaluated again in both serum and CSF samples at approximately 1 week prior to dosing, confirming the absence or minimal circulating neutralizing antibodies in all but three animals. On Day 15 and Day 29 post-dosing, there were significant neutralizing antibodies present in both serum and CSF of all animals.

[0835] SOD1 mRNA levels were assessed for suppression after treatment with pri-miRNA VOYmiR127.860 packaged in AAVrh10, relative to the vehicle group. RT-qPCR on laser captured lumbar and sacral motor neurons was evaluated (approximately 500 motor neurons per pool for the lumbar samples and 250 motor neurons per pool for the sacral samples). For laser captured motor neuron samples, SOD1 mRNA, levels of a motor neuron specific gene (choline acetyltransferase (ChAT)), and two reference genes (alanyl-tRNA synthetase (AARS) and Beta-actin (ACTB)) were determined by qRT-PCR. hSOD1 mRNA levels were normalized to the geometric mean of the two reference gene mRNA levels, and then expressed relative to the vehicle control group. Intrathecal infusion of pri-miRNA VOYmiR127.860 packaged in AAVrh10, resulted in 33+/−17.8% (average ±SD, p<0.05) and 78+/−12.7% (average ±SD, p<0.0001) suppression of SOD1 mRNA in laser captured motor neurons from the lumbar and sacral spinal cord, respectively, relative to the vehicle group.

[0836] In addition, a duplex RNAscope in situ hybridization (ISH) assay was used for co-detection of vector genomes (Vg) and cynomolgus SOD1 mRNA in motor neurons in the non-human primate lumbar spinal cord after treatment with pri-miRNA VOYmiR127.860 packaged in AAVrh10, relative to the vehicle group. RNA ISH for vg and cynnomolgus SOD1 was performed on an automation platform using the RNAscope 2.5 LS Duplex Reagent Kit (Advanced Cell Diagnostics, Inc., Newark, Calif.) according to the manufacturer's instructions. Briefly, 5 μm formalin fixed, paraffin embedded (FFPE) tissue sections were pretreated with heat and protease prior to hybridization with the target oligo probes. Preamplifier, amplifier and HRP/AP-labels oligo was then hybridized sequentially, followed by chromogenic precipitate development. Each sample was quality controlled for RNA integrity with a RNAscope probe specific to PPIB/POLR2A RNA and for background with a probe specific to bacterial dapB RNA. Specific RNA staining signal was identified as green (C1) and red (C2), punctate dots. Samples were counterstained with Mayer's Hematoxylin. Visual scoring was performed by a qualified scientist to assign a single score to a sample based on the average number of dots per cell throughout the entire sample. SOD1 expression levels in the Vg+ lumbar motor neurons were scored and there was a 53+/−11.2% (average ±SD, p=0.0002) reduction of SOD1 signal observed in Vg+ lumbar motor neurons from animals treated with pri-miRNA VOYmiR127.860 packaged in AAVrh10, as compared to vehicle control lumbar motor neurons. In contrast, there was a 10+/−13.4% (average ±SD, p=0.17) reduction of SOD1 signal observed in Vg-lumbar motor neurons from animals treated with pri-miRNA VOYmiR127.860 packaged in AAVrh10, as compared to vehicle control lumbar motor neurons.

[0837] Shown in Table 25 and Table 26 are the levels of the vector genome in different tissues. Vector genome was determined by Droplet Digital PCR (ddPCR). Briefly, DNA was purified from LCM samples with DNA Clean and Concentrator Kit (Zymorsearch) and whole cell DNA was prepared from tissue by DNeasy Blood and Tissue Kit (Qiagen, catalog #69506) under the conditions recommended by the manufacturer. This DNA was used as template in ddPCR reactions utilizing QX200 Droplet Digital PCR System (Bio-Rad). Briefly, reactions comprised of template, 2× Supermix (BioRad, catalog #1863023). HindIII restriction endonuclease (New England Biolabs) and oligonucleotide probesets with homology specific to the vector (FAM labelled) and non-human primate host RNaseP gene (VIC labelled. [ThermoFisher Scientific, #4403328]) were set up. Reactions were incorporated into droplets with Bio-Rad Automatic Droplet Generator with conditions and reagents recommended by the manufacturer. Droplets underwent 40 cycles of thermocycling to endpoint. After PCR was complete, samples were read on QX200 Droplet Reader (Bio-Rad). Data were analyzed by QuantaSoft software to yield copies/reaction of each target. Vector genome distribution was reported as copies of vector genome per diploid cell (VG/DC) by normalizing the copies of vector to half the copies of host. Included in the tables are the averaged group data with and without the neutralizing antibody-positive animals. The presence of neutralizing antibodies did not diminish the VG/DC levels in the CNS tissues sampled, whereas the VG/DC levels in peripheral tissues were lower than in animals that were negative for neutralizing antibodies. In the laser captured motor neurons (approximately 75 motor neurons per pool), significant vector genomes averaging 13.64 VG/DC were measured. In spinal cord white matter sections (depleted of ventral horn gray matter and pia), average (all 4 animals) levels of 35.4 vg/dc were observed. In the liver, the vg levels averaged 120.36+/−121.01 VG/DC (all 4 animals) whereas the sero-negative animals averaged 224.75+/−4.23 VG/DC. Vector genome levels in heart, lung, kidney, and ovary were markedly lower than those observed in liver or spinal cord white matter, with the levels in ovary and kidney at or approaching the limit of detection for the assay.

TABLE 25
Biodistribution by Vector Genome Determination in Nonhuman Primate Peripheral Tissues

| | Number of | Average Vector genomes/cell (VG/DC) | | | | |
|---|---|---|---|---|---|---|
| Construct | animals | Liver | Heart | Lung | Ovary | Kidney |
| Vehicle | 4 | 1.95 +/− 0.01 | 1.97 +/− 0.01 | 1.99 +/− 0.00 | 1.98 +/− 0.02 | 1.97 +/− 0.01 |
| VOYmiR127.860 | 4 | 120.36 +/− 121.01 | 3.30 +/− 1.90 | 2.69 +/− 0.82 | 2.03 +/− 0.07 | 2.19 +/− 0.19 |
| | 2 (without | 224.75 +/− 4.23 | 4.60 +/− 2.02 | 3.29 +/− 0.74 | 2.09 +/− 0.02 | 2.24 +/− 0.25 |
| | neutralizing | | | | | |
| | antibody-positive | | | | | |
| | animals) | | | | | |

TABLE 26
Biodistribution by Vector Genome Determination in
Nonhuman Primate Spinal Cord Samples

| | | Average Vector genomes/cell (VG/DC) | | |
|---|---|---|---|---|
| | Number of | | | Laser Captured |
| Construct | animals | Pia Mater | White Matter | Motor Neurons |
| Vehicle | 4 | 1.96 +/− 0.01 | 1.97 +/− 0.07 | 1.58 +/− 0.63 |
| VOYmiR127.860 | 4 | 201.84 +/− 107.93 | 35.40 +/− 8.59 | 13.64 +/− 11.67 |
| | 2 (without | 141.82 +/− 85.84 | 31.86 +/− 4.14 | 6.59 |
| | neutralizing | | | |
| | antibody-positive | | | |
| | animals) | | | |

[0838] Precision and efficiency of pri-miRNA processing was evaluated by deep sequencing of ventral horn punches from the lumbar spinal cord, using the same methods as described above. These results showed that treatment with VOYmiR127.860 packaged in AAVrh10 resulted in a high guide to passenger ratio (>30.5), a high percentage of miRNAs with precise processing at the 5′ end (90.7+/−4.5%), and a low level of guide and passenger strands relative to the total endogenous pool of miRNAs (0.00096+/−0.00054%).

[0839] Histology was conducted on animals euthanized on Day 29. No animals in any treatment group had gross lesions at necropsy. Microscopic histopathology was conducted on spinal cord and liver, and no histopathological findings related to VOYmiR127.860 packaged in AAVrh10 were detected.

### Example 8. SOD1 Knock-Down Mammalian Studies

### Pharmacology and Efficacy

[0840] To study the efficacy and pharmacology of the VOYmiR127.860, studies will be conducted in SOD1-G93A mouse models of ALS.

[0841] Mice will be administered by IT administration of at least 2 dosage levels (low and high vg). Alternatively, IV dosing will be used as a surrogate route of administration.

[0842] For the pharmacology study, three groups of 10 mice/group, approximately 40 to 50 days of age and balanced for gender, will receive vehicle or VOYmiR127.860 packaged in AAVrh10 at either high or low dose levels. All animals will be euthanized after four weeks and spinal cord tissue samples will be evaluated for SOD1 suppression by RT-qPCR. Body weights and cage-side observation will also be collected.

[0843] After the pharmacology study, an efficacy study of VOYmiR127.860 packaged in AAVrh10 will be conducted in SOD1-G93A mice. Two groups of approximately 32 mice/group, approximately 40 to 50 days of age and balanced for gender will receive vehicle or VOYmiR127-860 packaged in AAVrh10 at a high or low dose level. Endpoints will include body weight, neurological monitoring, and survival. Spinal cord tissue samples will also be evaluated for SOD1 suppression by RT-qPCR.

### Pharmacology, Toxicity and Biodistribution Study in NHPs

[0844] In order to evaluate the safety and distribution of VOYmiR127.860 packaged in AAVrh10, a study in NHP with a one-time IT infusion, will be conducted. Three time points—4, 13 and 26 weeks—will be evaluated. The 4-week survival period after a one-time dose is intended to provide sufficient time for SOD1 suppression to be attained and to provide information on the short-term effects of VOYmiR127.860 packaged in AAVrh10. The 13-week and 26-week time points is intended to provide information on the long-term effects of VOYmiR127.860 packaged in AAVrh10.

[0845] Prior to enrollment, animals will be screened for the presence of neutralizing antibodies to the AAVrh10 capsid, as well as for abnormal serum chemistry profiles. Three dose levels will be tested. A control of vehicle only will also be tested.

[0846] Vector genomes will be quantified in all of the dose groups at 4 weeks. Tissues that have no detectable vector genomes at four weeks will not be evaluated at the 13-week or 26-week time points. Tissues that have detectable vector genomes at four weeks will be evaluated at the 13-week time point. All tissues and organs will be archived for possible vg quantification.

[0847] Primary outcome measures will include a PCR analysis of vector genomes within different CNS regions and major peripheral organs, including heart and lungs, a histopathological assessment of target and non-target tissues that have significant vector genome levels, and clinical pathology including serum chemistry, hematology, and coagulation. Safety pharmacology (central nervous, cardiovascular, and respiratory systems) and local tolerance will also be evaluated.

[0848] While the present invention has been described at some length and with some particularity with respect to the several described embodiments, it is not intended that it should be limited to any such particulars or embodiments or any particular embodiment, but it is to be construed with references to the appended claims so as to provide the broadest possible interpretation of such claims in view of the prior art and, therefore, to effectively encompass the intended scope of the invention.

[0849] All publications, patent applications, patents, and other references mentioned herein are incorporated by reference in their entirety. In case of conflict, the present specification, including definitions, will control. In addition, section headings, the materials, methods, and examples are illustrative only and not intended to be limiting.

The application's sequence listing, which the Patent Office published only in electronic form, follows.

SEQUENCE LISTING (2241 sequences)

SEQ ID NO: 1 - DNA, 2211 bp, Adeno-associated virus 1
atggctgccgatggttatcttccagattggctcgaggacaacctctctgagggcattcgcgagtggtgggacttgaaacctggagccccgaagcccaaagccaaccagcaaaagcaggacgacggccggggtctggtgcttcctggctacaagtacctcggacccttcaacggactcgacaagggggagcccgtcaacgcggcggacgcagcggccctcgagcacgacaaggcctacgaccagcagctcaaagcgggtgacaatccgtacctgcggtataaccacgccgacgccgagtttcaggagcgtctgcaagaagatacgtcttttgggggcaacctcgggcgagcagtcttccaggccaagaagcgggttctcgaacctctcggtctggttgaggaaggcgctaagacggctcctggaaagaaacgtccggtagagcagtcgccacaagagccagactcctcctcgggcatcggcaagacaggccagcagcccgctaaaaagagactcaattttggtcagactggcgactcagagtcagtccccgatccacaacctctcggagaacctccagcaacccccgctgctgtgggacctactacaatggcttcaggcggtggcgcaccaatggcagacaataacgaaggcgccgacggagtgggtaatgcctcaggaaattggcattgcgattccacatggctgggcgacagagtcatcaccaccagcacccgcacctgggccttgcccacctacaataaccacctctacaagcaaatctccagtgcttcaacgggggccagcaacgacaaccactacttcggctacagcaccccctgggggtattttgatttcaacagattccactgccacttttcaccacgtgactggcagcgactcatcaacaacaattggggattccggcccaagagactcaacttcaaactcttcaacatccaagtcaaggaggtcacgacgaatgatggcgtcacaaccatcgctaataaccttaccagcacggttcaagtcttctcggactcggagtaccagcttccgtacgtcctcggctctgcgcaccagggctgcctccctccgttcccggcggacgtgttcatgattccgcaatacggctacctgacgctcaacaatggcagccaagccgtgggacgttcatccttttactgcctggaatatttcccttctcagatgctgagaacgggcaacaactttaccttcagctacacctttgaggaagtgcctttccacagcagctacgcgcacagccagagcctggaccggctgatgaatcctctcatcgaccaatacctgtattacctgaacagaactcaaaatcagtccggaagtgcccaaaacaaggacttgctgtttagccgtgggtctccagctggcatgtctgttcagcccaaaaactggctacctggaccctgttatcggcagcagcgcgtttctaaaacaaaaacagacaacaacaacagcaattttacctggactggtgcttcaaaatataacctcaatgggcgtgaatccatcatcaaccctggcactgctatggcctcacacaaagacgacgaagacaagttctttcccatgagcggtgtcatgatttttggaaaagagagcgccggagcttcaaacactgcattggacaatgtcatgattacagacgaagaggaaattaaagccactaaccctgtggccaccgaaagatttgggaccgtggcagtcaatttccagagcagcagcacagaccctgcgaccggagatgtgcatgctatgggagcattacctggcatggtgtggcaagatagagacgtgtacctgcagggtcccatttgggccaaaattcctcacacagatggacactttcacccgtctcctcttatgggcggctttggactcaagaacccgcctcctcagatcctcatcaaaaacacgcctgttcctgcgaatcctccggcggagttttcagctacaaagtttgcttcattcatcacccaatactccacaggacaagtgagtgtggaaattgaatgggagctgcagaaagaaaacagcaagcgctggaatcccgaagtgcagtacacatccaattatgcaaaatctgccaacgttgattttactgtggacaacaatggactttatactgagcctcgccccattggcacccgttaccttacccgtcccctgtaa

SEQ ID NO: 2 - protein, 736 aa, Adeno-associated virus 1
MAADGYLPDWLEDNLSEGIREWWDLKPGAPKPKANQQKQDDGRGLVLPGYKYLGPFNGLDKGEPVNAADAAALEHDKAYDQQLKAGDNPYLRYNHADAEFQERLQEDTSFGGNLGRAVFQAKKRVLEPLGLVEEGAKTAPGKKRPVEQSPQEPDSSSGIGKTGQQPAKKRLNFGQTGDSESVPDPQPLGEPPATPAAVGPTTMASGGGAPMADNNEGADGVGNASGNWHCDSTWLGDRVITTSTRTWALPTYNNHLYKQISSASTGASNDNHYFGYSTPWGYFDFNRFHCHFSPRDWQRLINNNWGFRPKRLNFKLFNIQVKEVTTNDGVTTIANNLTSTVQVFSDSEYQLPYVLGSAHQGCLPPFPADVFMIPQYGYLTLNNGSQAVGRSSFYCLEYFPSQMLRTGNNFTFSYTFEEVPFHSSYAHSQSLDRLMNPLIDQYLYYLNRTQNQSGSAQNKDLLFSRGSPAGMSVQPKNWLPGPCYRQQRVSKTKTDNNNSNFTWTGASKYNLNGRESIINPGTAMASHKDDEDKFFPMSGVMIFGKESAGASNTALDNVMITDEEEIKATNPVATERFGTVAVNFQSSSTDPATGDVHAMGALPGMVWQDRDVYLQGPIWAKIPHTDGHFHPSPLMGGFGLKNPPPQILIKNTPVPANPPAEFSATKFASFITQYSTGQVSVEIEWELQKENSKRWNPEVQYTSNYAKSANVDFTVDNNGLYTEPRPIGTRYLTRPL

SEQ ID NO: 3 - DNA, 4718 bp, Adeno-associated virus 1
ttgcccactccctctctgcgcgctcgctcgctcggtggggcctgcggaccaaaggtccgcagacggcagagctctgctctgccggccccaccgagcgagcgagcgcgcagagagggagtgggcaactccatcactaggggtaatcgcgaagcgcctcccacgctgccgcgtcagcgctgacgtaaattacgtcataggggagtggtcctgtattagctgtcacgtgagtgcttttgcgacattttgcgacaccacgtggccatttagggtatatatggccgagtgagcgagcaggatctccattttgaccgcgaaatttgaacgagcagcagccatgccgggcttctacgagatcgtgatcaaggtgccgagcgacctggacgagcacctgccgggcatttctgactcgtttgtgagctgggtggccgagaaggaatgggagctgcccccggattctgacatggatctgaatctgattgagcaggcacccctgaccgtggccgagaagctgcagcgcgacttcctggtccaatggcgccgcgtgagtaaggccccggaggccctcttctttgttcagttcgagaagggcgagtcctacttccacctccatattctggtggagaccacgggggtcaaatccatggtgctgggccgcttcctgagtcagattagggacaagctggtgcagaccatctaccgcgggatcgagccgaccctgcccaactggttcgcggtgaccaagacgcgtaatggcgccggaggggggaacaaggtggtggacgagtgctacatccccaactacctcctgcccaagactcagcccgagctgcagtgggcgtggactaacatggaggagtatataagcgcctgtttgaacctggccgagcgcaaacggctcgtggcgcagcacctgacccacgtcagccagacccaggagcagaacaaggagaatctgaaccccaattctgacgcgcctgtcatccggtcaaaaacctccgcgcgctacatggagctggtcgggtggctggtggaccggggcatcacctccgagaagcagtggatccaggaggaccaggcctcgtacatctccttcaacgccgcttccaactcgcggtcccagatcaaggccgctctggacaatgccggcaagatcatggcgctgaccaaatccgcgcccgactacctggtaggccccgctccgcccgcggacattaaaaccaaccgcatctaccgcatcctggagctgaacggctacgaacctgcctacgccggctccgtctttctcggctgggcccagaaaaggttcgggaagcgcaacaccatctggctgtttgggccggccaccacgggcaagaccaacatcgcggaagccatcgcccacgccgtgcccttctacggctgcgtcaactggaccaatgagaactttcccttcaatgattgcgtcgacaagatggtgatctggtgggaggagggcaagatgacggccaaggtcgtggagtccgccaaggccattctcggcggcagcaaggtgcgcgtggaccaaaagtgcaagtcgtccgcccagatcgaccccacccccgtgatcgtcacctccaacaccaacatgtgcgccgtgattgacgggaacagcaccaccttcgagcaccagcagccgttgcaggaccggatgttcaaatttgaactcacccgccgtctggagcatgactttggcaaggtgacaaagcaggaagtcaaagagttcttccgctgggcgcaggatcacgtgaccgaggtggcgcatgagttctacgtcagaaagggtggagccaacaaaagacccgcccccgatgacgcggataaaagcgagcccaagcgggcctgcccctcagtcgcggatccatcgacgtcagacgcggaaggagctccggtggactttgccgacaggtaccaaaacaaatgttctcgtcacgcgggcatgcttcagatgctgtttccctgcaagacatgcgagagaatgaatcagaatttcaacatttgcttcacgcacgggacgagagactgttcagagtgcttccccggcgtgtcagaatctcaaccggtcgtcagaaagaggacgtatcggaaactctgtgccattcatcatctgctggggcgggctcccgagattgcttgctcggcctgcgatctggtcaacgtggacctggatgactgtgtttctgagcaataaatgacttaaaccaggtatggctgccgatggttatcttccagattggctcgaggacaacctctctgagggcattcgcgagtggtgggacttgaaacctggagccccgaagcccaaagccaaccagcaaaagcaggacgacggccggggtctggtgcttcctggctacaagtacctcggacccttcaacggactcgacaagggggagcccgtcaacgcggcggacgcagcggccctcgagcacgacaaggcctacgaccagcagctcaaagcgggtgacaatccgtacctgcggtataaccacgccgacgccgagtttcaggagcgtctgcaagaagatacgtcttttgggggcaacctcgggcgagcagtcttccaggccaagaagcgggttctcgaacctctcggtctggttgaggaaggcgctaagacggctcctggaaagaaacgtccggtagagcagtcgccacaagagccagactcctcctcgggcatcggcaagacaggccagcagcccgctaaaaagagactcaattttggtcagactggcgactcagagtcagtccccgatccacaacctctcggagaacctccagcaacccccgctgctgtgggacctactacaatggcttcaggcggtggcgcaccaatggcagacaataacgaaggcgccgacggagtgggtaatgcctcaggaaattggcattgcgattccacatggctgggcgacagagtcatcaccaccagcacccgcacctgggccttgcccacctacaataaccacctctacaagcaaatctccagtgcttcaacgggggccagcaacgacaaccactacttcggctacagcaccccctgggggtattttgatttcaacagattccactgccacttttcaccacgtgactggcagcgactcatcaacaacaattggggattccggcccaagagactcaacttcaaactcttcaacatccaagtcaaggaggtcacgacgaatgatggcgtcacaaccatcgctaataaccttaccagcacggttcaagtcttctcggactcggagtaccagcttccgtacgtcctcggctctgcgcaccagggctgcctccctccgttcccggcggacgtgttcatgattccgcaatacggctacctgacgctcaacaatggcagccaagccgtgggacgttcatccttttactgcctggaatatttcccttctcagatgctgagaacgggcaacaactttaccttcagctacacctttgaggaagtgcctttccacagcagctacgcgcacagccagagcctggaccggctgatgaatcctctcatcgaccaatacctgtattacctgaacagaactcaaaatcagtccggaagtgcccaaaacaaggacttgctgtttagccgtgggtctccagctggcatgtctgttcagcccaaaaactggctacctggaccctgttatcggcagcagcgcgtttctaaaacaaaaacagacaacaacaacagcaattttacctggactggtgcttcaaaatataacctcaatgggcgtgaatccatcatcaaccctggcactgctatggcctcacacaaagacgacgaagacaagttctttcccatgagcggtgtcatgatttttggaaaagagagcgccggagcttcaaacactgcattggacaatgtcatgattacagacgaagaggaaattaaagccactaaccctgtggccaccgaaagatttgggaccgtggcagtcaatttccagagcagcagcacagaccctgcgaccggagatgtgcatgctatgggagcattacctggcatggtgtggcaagatagagacgtgtacctgcagggtcccatttgggccaaaattcctcacacagatggacactttcacccgtctcctcttatgggcggctttggactcaagaacccgcctcctcagatcctcatcaaaaacacgcctgttcctgcgaatcctccggcggagttttcagctacaaagtttgcttcattcatcacccaatactccacaggacaagtgagtgtggaaattgaatgggagctgcagaaagaaaacagcaagcgctggaatcccgaagtgcagtacacatccaattatgcaaaatctgccaacgttgattttactgtggacaacaatggactttatactgagcctcgccccattggcacccgttaccttacccgtcccctgtaattacgtgttaatcaataaaccggttgattcgtttcagttgaactttggtctcctgtccttcttatcttatcggttaccatggttatagcttacacattaactgcttggttgcgcttcgcgataaaagacttacgtcatcgggttacccctagtgatggagttgcccactccctctctgcgcgctcgctcgctcggtggggcctgcggaccaaaggtccgcagacggcagagctctgctctgccggccccaccgagcgagcgagcgcgcagagagggagtgggcaa

SEQ ID NO: 4 - DNA, 3131 bp, Adeno-associated virus
gcggccgcgaattcgcccttggctgcgtcaactggaccaatgagaactttcccttcaatgattgcgtcgacaagatggtgatctggtgggaggagggcaagatgacggccaaggtcgtggagtccgccaaggccattctcggcggcagcaaggtgcgcgtggaccaaaagtgcaagtcgtccgcccagatcgaccccacccccgtgatcgtcacctccaacaccaacatgtgcgccgtgattgacgggaacagcaccaccttcgagcaccagcagcctctccaggaccggatgtttaagttcgaactcacccgccgtctggagcacgactttggcaaggtgacaaagcaggaagtcaaagagttcttccgctgggccagtgatcacgtgaccgaggtggcgcatgagttttacgtcagaaagggcggagccagcaaaagacccgcccccgatgacgcggataaaagcgagcccaagcgggcctgcccctcagtcgcggatccatcgacgtcagacgcggaaggagctccggtggactttgccgacaggtaccaaaacaaatgttctcgtcacgcgggcatgcttcagatgctgtttccctgcaaaacgtgcgagagaatgaatcggaatttcaacatttgcttcacacacggggtcagagactgctcagagtgtttccccggcgtgtcagaatctcaaccggtcgtcagaaagaggacgtatcggaaactccgtgcgattcatcatctgctggggcgggctcccgagattgcttgctcggcctgcgatctggtcaacgtggacctggatgactgtgtttctgagcaataaatgacttaaaccaggtatggctgccgatggttatcttccagattggctcgaggacaacctctctgagggcattcgcgagtggtgggcgctgaaacctggagccccgaagcccaaagccaaccagcaaaagcaggacgacggccggggtctggtgcttcctggctacaagtacctcggacccttcaacggactcgacaagggggagcccgtcaacgcggcggacgcagcggccctcgagcacgacaaggcttacgaccagcagctgcaggcgggtgacaatccgtacctgcggtataaccacgccgacgccgagtttcaggagcgtctgcaagaagatacgtcttttgggggcaacctcgggcgagcagtcttccaggccaagaagcgggttctcgaacctctcggtctggttgaggaaggcgctaagacggctcctggaaagaagagaccggtagagccatcaccccagcgttctccagactcctctacgggcatcggcaagaaaggccaacagcccgccagaaaaagactcaattttggtcagactggcgactcagagtcagttccagaccctcaacctctcggagaacctccagcagcgccctctggtgtgggacctaatacaatggctgcaggcggtggcgcaccaatggcagacaataacgaaggcgccgacggagtgggtagttcctcgggaaattggcattgcgattccacatggctgggcgacagagtcatcaccaccagcacccgaacctgggccctgcccacctacaacaaccacctctacaagcaaatctccaacgggacatcgggaggagccaccaacgacaacacctacttcggctacagcaccccctgggggtattttgactttaacagattccactgccacctttcaccacgtgactggcagcgactcatcaacaacaactggggattccgacccaagagactcagcttcaagctcttcaacatccaggtcaaggaggtcacgcagaatgaaggcaccaagaccatcgccaataacctcaccagcaccatccaggtgtttacggactcggagtaccagctgccgtacgttctcggctctgtccaccagggctgcctgcctccgttcccggcggacgtgttcatgattccccagtacggctacctaacactcaacaacggtagtcaggccgtgggacgctcctccttctactgcctggaatactttccttcgcagatgctgagaaccggcaacaacttccagtttacttacaccttcgaggacgtgcctttccacagcagctacgcccacagctagagcttggaccggctgatgaatcctctgattgaccagtacctgtactacttgtctcggactcaaacaacaggaggcacggcaaatacgcagactctgggcttcagccaaggtgggcctaatacaatggccaatcaggcaaagaactggctgccaggaccctgttaccgccaacaacgcgtctcaacgacaaccgggcaaaacaacaatagcaactttgcctggactgctgggaccaaataccatctgaatggaagaaattcattggctaatcctggcatcgctatggcaacacacaaagacgacgaggagcgtttttttcccagtaacgggatcctgatttttggcaaacaaaatgctgccagagacaatgcggattacagcgatgtcatgctcaccagcgaggaagaaatcaaaaccactaaccctgtggctacagaggaatacggtatcgtggcagataacttgcagcagcaaaacacggctcctcaaattggaactgtcaacagccagggggccttacccggtatggtctggcagaaccgggacgtgtacctgcagggtcccatctgggccaagattcctcacacggacggcaacttccacccgtctccgctgatgggcggctttggcctgaaacatcctccgcctcagatcctgatcaagaacacgcctgtacctgcggatcctccgaccaccttcaaccagtcaaagctgaactctttcatcacgcaatacagcaccggacaggtcagcgtggaaattgaatgggagctgcagaaggaaaacagcaagcgctggaaccccgagatccagtacacctccaactactacaaatctataagtgtggactttgctgttaatacagaaggcgtgtactctgaaccccgccccattggcacccgttacctcacccgtaatctgtaattgcctgttaatcaataaaccggttgattcgtttcagttgaactttggtctctgcgaagggcgaattc

SEQ ID NO: 5 - DNA, 255 bp, Adeno-associated virus 10
ggtaattcctccggaaattggcattgcgattccacatggctgggcgacagagtcatcaccaccagcacccgaacctgggtcctgcccacctacaacaaccacatctacaagcaaatctccagcgagacaggagccaccaacgacaaccactacttcggctacagcaccccctgggggtattttgactttaacagattccactgccacttttcaccacgtgactggcagcgactcatcaacaacaactggggattc

SEQ ID NO: 6 - protein, 738 aa, Adeno-associated virus 10
MAADGYLPDWLEDNLSEGIREWWDLKPGAPKPKANQQKQDDGRGLVLPGYKYLGPFNGLDKGEPVNAADAAALEHDKAYDQQLKAGDNPYLRYNHADAEFQERLQEDTSFGGNLGRAVFQAKKRVLEPLGLVEEAAKTAPGKKRPVEPSPQRSPDSSTGIGKKGQQPAKKRLNFGQTGESESVPDPQPIGEPPAGPSGLGSGTMAAGGGAPMADNNEGADGVGSSSGNWHCDSTWLGDRVITTSTRTWALPTYNNHLYKQISNGTSGGSTNDNTYFGYSTPWGYFDFNRFHCHFSPRDWQRLINNNWGFRPKRLSFKLFNIQVKEVTQNEGTKTIANNLTSTIQVFTDSEYQLPYVLGSAHQGCLPPFPADVFMIPQYGYLTLNNGSQAVGRSSFYCLEYFPSQMLRTGNNFEFSYTFEDVPFHSSYAHSQSLDRLMNPLIDQYLYYLSRTQSTGGTQGTQQLLFSQAGPANMSAQAKNWLPGPCYRQQRVSTTLSQNNNSNFAWTGATKYHLNGRDSLVNPGVAMATHKDDEERFFPSSGVLMFGKQGAGRDNVDYSSVMLTSEEEIKTTNPVATEQYGVVADNLQQANTGPIVGNVNSQGALPGMVWQNRDVYLQGPIWAKIPHTDGNFHPSPLMGGFGLKHPPPQILIKNTPVPADPPTTFSQAKLASFITQYSTGQVSVEIEWELQKENSKRWNPEIQYTSNYYKSTNVDFAVNTEGTYSEPRPIGTRYLTRNL

SEQ ID NO: 7 - protein, 738 aa, Adeno-associated virus 10
MAADGYLPDWLEDNLSEGIREWWDLKPGAPKPKANQQKQDDGRGLVLPGYKYLGPFNGLDKGEPVNAADAAALEHDKAYDQQLKAGDNPYLRYNHADAEFQERLQEDTSFGGNLGRAVFQAKKRVLEPLGLVEEGAKTAPGKKRPVEPSPQRSPDSSTGIGKKGQQPAKKRLNFGQTGDSESVPDPQPIGEPPAGPSGLGSGTMAAGGGAPMADNNEGADGVGSSSGNWHCDSTWLGDRVITTSTRTWALPTYNNHLYKQISNGTSGGSTNDNTYFGYSTPWGYFDFNRFHCHFSPRDWQRLINNNWGFRPKRLNFKLFNIQVKEVTQNEGTKTIANNLTSTIQVFTDSEYQLPYVLGSAHQGCLPPFPADVFMIPQYGYLTLNNGSQAVGRSSFYCLEYFPSQMLRTGNNFEFSYQFEDVPFHSSYAHSQSLDRLMNPLIDQYLYYLSRTQSTGGTAGTQQLLFSQAGPNNMSAQAKNWLPGPCYRQQRVSTTLSQNNNSNFAWTGATKYHLNGRDSLVNPGVAMATHKDDEERFFPSSGVLMFGKQGAGKDNVDYSSVMLTSEEEIKTTNPVATEQYGVVADNLQQQNAAPIVGAVNSQGALPGMVWQNRDVYLQGPIWAKIPHTDGNFHPSPLMGGFGLKHPPPQILIKNTPVPADPPTTFSQAKLASFITQYSTGQVSVEIEWELQKENSKRWNPEIQYTSNYYKSTNVDFAVNTDGTYSEPRPIGTRYLTRNL

SEQ ID NO: 8 - DNA, 258 bp, Adeno-associated virus 11
ggtaattcctccggaaattggcattgcgattccacatggctgggcgacagagtcatcaccaccagcacccgaacctgggccctgccaacctacaacaaccacctctacaaacaaatctccagcgcttcaacgggggccagcaacgacaaccactactttggctacagcaccccctgggggtattttgactttaacagattccactgccacttctcaccacgtgactggcagcgactcatcaacaacaactggggattc

SEQ ID NO: 9 - DNA, 255 bp, Adeno-associated virus 12
ggtaattcctccggaaattggcattgcgattccacatggctgggcgaccgagtcattaccaccagcacccggacttgggccctgcccacctacaacaaccacctctacaagcaaatctccagccaatcgggtgccaccaacgacaaccactacttcggctacagcaccccttgggggtattttgatttcaacagattccactgccatttctcaccacgtgactggcagcgactcatcaacaacaactggggattc

SEQ ID NO: 10 - DNA, 2208 bp, Adeno-associated virus 2
atggctgccgatggttatcttccagattggctcgaggacactctctctgaaggaataagacagtggtggaagctcaaacctggcccaccaccaccaaagcccgcagagcggcataaggacgacagcaggggtcttgtgcttcctgggtacaagtacctcggacccttcaacggactcgacaagggagagccggtcaacgaggcagacgccgcggccctcgagcacgacaaagcctacgaccggcagctcgacagcggagacaacccgtacctcaagtacaaccacgccgacgcggagtttcaggagcgccttaaagaagatacgtcttttgggggcaacctcggacgagcagtcttccaggcgaaaaagagggttcttgaacctctgggcctggttgaggaacctgttaagacggctccgggaaaaaagaggccggtagagcactctcctgtggagccagactcctcctcgggaaccggaaaggcgggccagcagcctgcaagaaaaagattgaattttggtcagactggagacgcagactcagtacctgacccccagcctctcggacagccaccagcagccccctctggtctgggaactaatacgatggctacaggcagtggcgcaccaatggcagacaataacgagggcgccgacggagtgggtaattcctcgggaaattggcattgcgattccacatggatgggcgacagagtcatcaccaccagcacccgaacctgggccctgcccacctacaacaaccacctctacaaacaaatttccagccaatcaggagcctcgaacgacaatcactactttggctacagcaccccttgggggtattttgacttcaacagattccactgccacttttcaccacgtgactggcaaagactcatcaacaacaactggggattccgacccaagagactcaacttcaagctctttaacattcaagtcaaagaggtcacgcagaatgacggtacgacgacgattgccaataaccttaccagcacggttcaggtgtttactgactcggagtaccagctcccgtacgtcctcggctcggcgcatcaaggatgcctcccgccgttcccagcagacgtcttcatggtgccacagtatggatacctcaccctgaacaacgggagtcaggcagtaggacgctcttcattttactgcctggagtactttccttctcagatgctgcgtaccggaaacaactttaccttcagctacacttttgaggacgttcctttccacagcagctacgctcacagccagagtctggaccgtctcatgaatcctctcatcgaccagtacctgtattacttgagcagaacaaacactccaagtggaaccaccacgcagtcaaggcttcagttttctcaggccggagcgagtgacattcgggaccagtctaggaactggcttcctggaccctgttaccgccagcagcgagtatcaaagacatctgcggataacaacaacagtgaatactcgtggactggagctaccaagtaccacctcaatggcagagactctctggtgaatccgggcccggccatggcaagccacaaggacgatgaagaaaagttttttcctcagagcggggttctcatctttgggaagcaaggctcagagaaaacaaatgtggacattgaaaaggtcatgattacagacgaagaggaaatcaggacaaccaatcccgtggctacggagcagtatggttctgtatctaccaacctccagagaggcaacagacaagcagctaccgcagatgtcaacacacaaggcgttcttccaggcatggtctggcaggacagagatgtgtaccttcaggggcccatctgggcaaagattccacacacggacggacattttcacccctctcccctcatgggtggattcggacttaaacaccctcctccacagattctcatcaagaacaccccggtacctgcgaatccttcgaccaccttcagtgcggcaaagtttgcttccttcatcacacagtactccacgggacaggtcagcgtggagatcgagtgggagctgcagaaggaaaacagcaaacgctggaatcccgaaattcagtacacttccaactacaacaagtctgttaatgtggactttactgtggacactaatggcgtgtattcagagcctcgccccattggcaccagatacctgactcgtaatctgtaa

SEQ ID NO: 11 - protein, 735 aa, Adeno-associated virus 2 [sequence omitted]

SEQ ID NO: 12 - protein, 621 aa, Adeno-associated virus 2
MPGFYEIVIKVPSDLDGHLPGISDSFVNWVAEKEWELPPDSDMDLNLIEQAPLTVAEKLQRDFLTEWRRVSKAPEALFFVQFEKGESYFHMHVLVETTGVKSMVLGRFLSQIREKLIQRIYRGIEPTLPNWFAVTKTRNGAGGGNKVVDECYIPNYLLPKTQPELQWAWTNMEQYLSACLNLTERKRLVAQHLTHVSQTQEQNKENQNPNSDAPVIRSKTSARYMELVGWLVDKGITSEKQWIQEDQASYISFNAASNSRSQIKAALDNAGKIMSLTKTAPDYLVGQQPVEDISSNRIYKILELNGYDPQYAASVFLGWATKKFGKRNTIWLFGPATTGKTNIAEAIAHTVPFYGCVNWTNENFPFNDCVDKMVIWWEEGKMTAKVVESAKAILGGSKVRVDQKCKSSAQIDPTPVIVTSNTNMCAVIDGNSTTFEHQQPLQDRMFKFELTRRLDHDFGKVTKQEVKDFFRWAKDHVVEVEHEFYVKKGGAKKRPAPSDADISEPKRVRESVAQPSTSDAEASINYADRYQNKCSRHVGMNLMLFPCRQCERMNQNSNICFTHGQKDCLECFPVSESQPVSVVKKAYQKLCYIHHIMGKVPDACTACDLVNVDLDDCIFEQ

SEQ ID NO: 13 - DNA, 4675 bp, Adeno-associated virus 2
ttggccactccctctctgcgcgctcgctcgctcactgaggccgggcgaccaaaggtcgcccgacgcccgggctttgcccgggcggcctcagtgagcgagcgagcgcgcagagagggagtggccaactccatcactaggggttcctggaggggtggagtcgtgacgtgaattacgtcatagggttagggaggtcctgtattagaggtcacgtgagtgttttgcgacattttgcgacaccatgtggtcacgctgggtatttaagcccgagtgagcacgcagggtctccattttgaagcgggaggtttgaacgcgcagccgccatgccggggttttacgagattgtgattaaggtccccagcgaccttgacgggcatctgcccggcatttctgacagctttgtgaactgggtggccgagaaggaatgggagttgccgccagattctgacatggatctgaatctgattgagcaggcacccctgaccgtggccgagaagctgcagcgcgactttctgacggaatggcgccgtgtgagtaaggccccggaggcccttttctttgtgcaatttgagaagggagagagctacttccacatgcacgtgctcgtggaaaccaccggggtgaaatccatggttttgggacgtttcctgagtcagattcgcgaaaaactgattcagagaatttaccgcgggatcgagccgactttgccaaactggttcgcggtcacaaagaccagaaatggcgccggaggcgggaacaaggtggtggatgagtgctacatccccaattacttgctccccaaaacccagcctgagctccagtgggcgtggactaatatggaacagtatttaagcgcctgtttgaatctcacggagcgtaaacggttggtggcgcagcatctgacgcacgtgtcgcagacgcaggagcagaacaaagagaatcagaatcccaattctgatgcgccggtgatcagatcaaaaacttcagccaggtacatggagctggtcgggtggctcgtggacaaggggattacctcggagaagcagtggatccaggaggaccaggcctcatacatctccttcaatgcggcctccaactcgcggtcccaaatcaaggctgccttggacaatgcgggaaagattatgagcctgactaaaaccgcccccgactacctggtgggccagcagcccgtggaggacatttccagcaatcggatttataaaattttggaactaaacgggtacgatccccaatatgcggcttccgtctttctgggatgggccacgaaaaagttcggcaagaggaacaccatctggctgtttgggcctgcaactaccgggaagaccaacatcgcggaggccatagcccacactgtgcccttctacgggtgcgtaaactggaccaatgagaactttcccttcaacgactgtgtcgacaagatggtgatctggtgggaggaggggaagatgaccgccaaggtcgtggagtcggccaaagccattctcggaggaagcaaggtgcgcgtggaccagaaatgcaagtcctcggcccagatagacccgactcccgtgatcgtcacctccaacaccaacatgtgcgccgtgattgacgggaactcaacgaccttcgaacaccagcagccgttgcaagaccggatgttcaaatttgaactcacccgccgtctggatcatgactttgggaaggtcaccaagcaggaagtcaaagactttttccggtgggcaaaggatcacgtggttgaggtggagcatgaattctacgtcaaaaagggtggagccaagaaaagacccgcccccagtgacgcagatataagtgagcccaaacgggtgcgcgagtcagttgcgcagccatcgacgtcagacgcggaagcttcgatcaactacgcagacaggtaccaaaacaaatgttctcgtcacgtgggcatgaatctgatgctgtttccctgcagacaatgcgagagaatgaatcagaattcaaatatctgcttcactcacggacagaaagactgtttagagtgctttcccgtgtcagaatctcaacccgtttctgtcgtcaaaaaggcgtatcagaaactgtgctacattcatcatatcatgggaaaggtgccagacgcttgcactgcctgcgatctggtcaatgtggatttggatgactgcatctttgaacaataaatgatttaaatcaggtatggctgccgatggttatcttccagattggctcgaggacactctctctgaaggaataagacagtggtggaagctcaaacctggcccaccaccaccaaagcccgcagagcggcataaggacgacagcaggggtcttgtgcttcctgggtacaagtacctcggacccttcaacggactcgacaagggagagccggtcaacgaggcagacgccgcggccctcgagcacgtacaaagcctacgaccggcagctcgacagcggagacaacccgtacctcaagtacaaccacgccgacgcggagtttcaggagcgccttaaagaagatacgtcttttgggggcaacctcggacgagcagtcttccaggcgaaaaagagggttcttgaacctctgggcctggttgaggaacctgttaagacggctccgggaaaaaagaggccggtagagcactctcctgtggagccagactcctcctcgggaaccggaaaggcgggccagcagcctgcaagaaaaagattgaattttggtcagactggagacgcagactcagtacctgacccccagcctctcggacagccaccagcagccccctctggtctgggaactaatacgatggctacaggcagtggcgcaccaatggcagacaataacgagggcgccgacggagtgggtaattcctccggaaattggcattgcgattccacatggatgggcgacagagtcatcaccaccagcacccgaacctgggccctgcccacctacaacaaccacctctacaaacaaatttccagccaatcaggagcctcgaacgacaatcactactttggctacagcaccccttgggggtattttgacttcaacagattccactgccacttttcaccacgtgactggcaaagactcatcaacaacaactggggattccgacccaagagactcaacttcaagctctttaacattcaagtcaaagaggtcacgcagaatgacggtacgacgacgattgccaataaccttaccagcacggttcaggtgtttactgactcggagtaccagctcccgtacgtcctcggctcggcgcatcaaggatgcctcccgccgttcccagcagacgtcttcatggtgccacagtatggatacctcaccctgaacaacgggagtcaggcagtaggacgctcttcattttactgcctggagtactttccttctcagatgctgcgtaccggaaacaactttaccttcagctacacttttgaggacgttcctttccacagcagctacgctcacagccagagtctggaccgtctcatgaatcctctcatcgaccagtacctgtattacttgagcagaacaaacactccaagtggaaccaccacgcagtcaaggcttcagttttctcaggccggagcgagtgacattcgggaccagtctaggaactggcttcctggaccctgttaccgccagcagcgagtatcaaagacatctgcggataacaacaacagtgaatactcgtggactggagctaccaagtaccacctcaatggcagagactctctggtgaatccggccatggcaagccacaaggacgatgaagaaaagttttttcctcagagcggggttctcatctttgggaagcaaggctcagagaaaacaaatgtgaacattgaaaaggtcatgattacagacgaagaggaaatcggaacaaccaatcccgtggctacggagcagtatggttctgtatctaccaacctccagagaggcaacagacaagcagctaccgcagatgtcaacacacaaggcgttcttccaggcatggtctggcaggacagagatgtgtaccttcaggggcccatctgggcaaagattccacacacggacggacattttcacccctctcccctcatgggtggattcggacttaaacaccctcctccacagattctcatcaagaacaccccggtacctgcgaatccttcgaccaccttcagtgcggcaaagtttgcttccttcatcacacagtactccacgggacacggtcagcgtggagatcgagtgggagctgcagaaggaaaacagcaaacgctggaatcccgaaattcagtacacttccaactacaacaagtctgttaatcgtggacttaccgtggatactaatggcgtgtattcagagcctcgccccattggcaccagatacctgactcgtaatctgtaattgcttgttaatcaataaaccgtttaattcgtttcagttgaactttggtctctgcgtatttctttcttatctagtttccatggctacgtagataagtagcatggcgggttaatcattaactacaaggaacccctagtgatggagttggccactccctctctgcgcgctcgctcgctcactgaggccgggcgaccaaaggtcgcccgacgcccgggctttgcccgggcggcctcagtgagcgagcgagcgcgcagagagggagtggccaa

SEQ ID NO: 14 - DNA, 4679 bp, Adeno-associated virus 2
ttggccactccctctctgcgcgctcgctcgctcactgaggccgggcgaccaaaggtcgcccgacgcccgggctttgcccgggcggcctcagtgagcgagcgagcgcgcagagagggagtggccaactccatcactaggggttcctggaggggtggagtcgtgacgtgaattacgtcatagggttagggaggtcctgtattagaggtcacgtgagtgttttgcgacattttgcgacaccatgtggtcacgctgggtatttaagcccgagtgagcacgcagggtctccattttgaagcgggaggtttgaacgcgcagccgccatgccggggttttacgagattgtgattaaggtccccagcgaccttgacgggcatctgcccggcatttctgacagctttgtgaactgggtggccgagaaggaatgggagttgccgccagattctgacatggatctgaatctgattgagcaggcacccctgaccgtggccgagaagctgcagcgcgactttctgacggaatggcgccgtgtgagtaaggccccggaggcccttttctttgtgcaatttgagaagggagagagctacttccacatgcacgtgctcgtggaaaccaccggggtgaaatccatggttttgggacgtttcctgagtcagattcgcgaaaaactgattcagagaatttaccgcgggatcgagccgactttgccaaactggttcgcggtcacaaagaccagaaatggcgccggaggcgggaacaaggtggtggatgagtgctacatccccaattacttgctccccaaaacccagcctgagctccagtgggcgtggactaatatggaacagtatttaagcgcctgtttgaatctcacggagcgtaaacggttggtggcgcagcatctgacgcacgtgtcgcagacgcaggagcagaacaaagagaatcagaatcccaattctgatgcgccggtgatcagatcaaaaacttcagccaggtacatggagctggtcgggtggctcgtggacaaggggattacctcggagaagcagtggatccaggaggaccaggcctcatacatctccttcaatgcggcctccaactcgcggtcccaaatcaaggctgccttggacaatgcgggaaagattatgagcctgactaaaaccgcccccgactacctggtgggccagcagcccgtggaggacatttccagcaatcggatttataaaattttggaactaaacgggtacgatccccaatatgcggcttccgtctttctgggatgggccacgaaaaagttcggcaagaggaacaccatctggctgtttgggcctgcaactaccgggaagaccaacatcgcggaggccatagcccacactgtgcccttctacgggtgcgtaaactggaccaatgagaactttcccttcaacgactgtgtcgacaagatggtgatctggtgggaggaggggaagatgaccgccaaggtcgtggagtcggccaaagccattctcggaggaagcaaggtgcgcgtggaccagaaatgcaagtcctcggcccagatagacccgactcccgtgatcgtcacctccaacaccaacatgtgcgccgtgattgacgggaactcaacgaccttcgaacaccagcagccgttgcaagaccggatgttcaaatttgaactcacccgccgtctggatcatgactttgggaaggtcaccaagcaggaagtcaaagactttttccggtgggcaaaggatcacgtggttgaggtggagcatgaattctacgtcaaaaagggtggagccaagaaaagacccgcccccagtgacgcagatataagtgagcccaaacgggtgcgcgagtcagttgcgcagccatcgacgtcagacgcggaagcttcgatcaactacgcagacaggtaccaaaacaaatgttctcgtcacgtgggcatgaatctgatgctgtttccctgcagacaatgcgagagaatgaatcagaattcaaatatctgcttcactcacggacagaaagactgtttagagtgctttcccgtgtcagaatctcaacccgtttctgtcgtcaaaaaggcgtatcagaaactgtgctacattcatcatatcatgggaaaggtgccagacgcttgcactgcctgcgatctggtcaatgtggatttggatgactgcatctttgaacaataaatgatttaaatcaggtatggctgccgatggttatcttccagattggctcgaggacactctctctgaaggaataagacagtggtggaagctcaaacctggcccaccaccaccaaagcccgcagagcggcataaggacgacagcaggggtcttgtgcttcctgggtacaagtacctcggacccttcaacggactcgacaagggagagccggtcaacgaggcagacgccgcggccctcgagcacgacaaagcctacgaccggcagctcgacagcggagacaacccgtacctcaagtacaaccacgccgacgcggagtttcaggagcgccttaaagaagatacgtcttttgggggcaacctcggacgagcagtcttccaggcgaaaaagagggttcttgaacctctgggcctggttgaggaacctgttaagacggctccgggaaaaaagaggccggtagagcactctcctgtggagccagactcctcctcgggaaccggaaaggcgggccagcagcctgcaagaaaaagattgaattttggtcagactggagacgcagactcagtacctgacccccagcctctcggacagccaccagcagccccctctggtctgggaactaatacgatggctacaggcagtggcgcaccaatggcagacaataacgagggcgccgacggagtgggtaattcctccggaaattggcattgcgattccacatggatgggcgacagagtcatcaccaccagcacccgaacctgggccctgcccacctacaacaaccacctctacaaacaaatttccagccaatcaggagcctcgaacgacaatcactactttggctacagcaccccttgggggtattttgacttcaacagattccactgccacttttcaccacgtgactggcaaagactcatcaacaacaactggggattccgacccaagagactcaacttcaagctctttaacattcaagtcaaagaggtcacgcagaatgacggtacgacgacgattgccaataaccttaccagcacggttcaggtgtttactgactcggagtaccagctcccgtacgtcctcggctcggcgcatcaaggatgcctcccgccgttcccagcagacgtcttcatggtgccacagtatggatacctcaccctgaacaacgggagtcaggcagtaggacgctcttcattttactgcctggagtactttccttctcagatgctgcgtaccggaaacaactttaccttcagctacacttttgaggacgttcctttccacagcagctacgctcacagccagagtctggaccgtctcatgaatcctctcatcgaccagtacctgtattacttgagcagaacaaacactccaagtggaaccaccacgcagtcaaggcttcagttttctcaggccggagcgagtgacattcgggaccagtctaggaactggcttcctggaccctgttaccgccagcagcgagtatcaaagacatctgcggataacaacaacagtgaatactcgtggactggagctaccaagtaccacctcaatggcagagactctctggtgaatccgggcccggccatggcaagccacaaggacgatgaagaaaagttttttcctcagagcggggttctcatctttgggaagcaaggctcagagaaaacaaatgtggacattgaaaaggtcatgattacagacgaagaggaaatcaggacaaccaatcccgtggctacggagcagtatggttctgtatctaccaacctccagagaggcaacagacaagcagctaccgcagatgtcaacacacaaggcgttcttccaggcatggtctggcaggacagagatgtgtaccttcaggggcccatctgggcaaagattccacacacggacggacattttcacccctctcccctcatgggtggattcggacttaaacaccctcctccacagattctcatcaagaacaccccggtacctgcgaatccttcgaccaccttcagtgcggcaaagtttgcttccttcatcacacagtactccacgggacaggtcagcgtggagatcgagtgggagctgcagaaggaaaacagcaaacgctggaatcccgaaattcagtacacttccaactacaacaagtctgttaatgtggactttactgtggacactaatggcgtgtattcagagcctcgccccattggcaccagatacctgactcgtaatctgtaattgcttgttaatcaataaaccgtttaattcgtttcagttgaactttggtctctgcgtatttctttcttatctagtttccatggctacgtagataagtagcatggcgggttaatcattaactacaaggaacccctagtgatggagttggccactccctctctgcgcgctcgctcgctcactgaggccgggcgaccaaaggtcgcccgacgcccgggctttgcccgggcggcctcagtgagcgagcgagcgcgcagagagggagtggccaa

SEQ ID NO: 15 - protein, 725 aa, Adeno-associated virus 5
MAADGYLPDWLEDTLSEGIRQWWKLKPGPPPPKPAERHKDDSRGLVLPGYKYLGPFNGLDKGEPVNEADAAALEHDKAYDRQLDSGDNPYLKYNHADAEFQERLKEDTSFGGNLGRAVFQAKKRVLEPFGLVEEGAKTAPTGKRIDDHFPKRKKARTEEDSKPSTSSDAEAGPSGSQQLQIPAQPASSLGADTMSAGGGGPLGDNNQGADGVGNASGDWHCDSTWMGDRVVTKSTRTWVLPSYNNHQYREIKSGSVDGSNANAYFGYSTPWGYFDFNRFHSHWSPRDWQRLINNYWGFRPRSLRVKIFNIQVKEVTVQDSTTTIANNLTSTVQVFTDDDYQLPYVVGNGTEGCLPAFPPQVFTLPQYGYATLNRDNTENPTERSSFFCLEYFPSKMLRTGNNFEFTYNFEEVPFHSSFAPSQNLFKLANPLVDQYLYRFVSTNNTGGVQFNKNLAGRYANTYKNWFPGPMGRTQGWNLGSGVNRASVSAFATTNRMELEGASYQVPPQPNGMTNNLQGSNTYALENTMIFNSQPANPGTTATYLEGNMLITSESETQPVNRVAYNVGGQMATNNQSSTTAPTTGTYNLQEIVPGSVWMERDVYLQGPIWAKIPETGAHFHPSPAMGGFGLKHPPPMMLIKNTPVPGNITSFSDVPVSSFITQYSTGQVTVEMEWELKKENSKRWNPEIQYTNNYNDPQFVDFAPDSTGEYRTTRPIGTRYLTRPL

SEQ ID NO: 16 - protein, 644 aa, Artificial Sequence
  Description of Artificial Sequence: Synthetic polypeptide
  MOD_RES (434)..(434): Xaa = any amino acid
KAYDQQLKAGDNPYLRYNHADAEFQERLQEDTSFGGNLGRAVFQAKKRVLEPLGLVETPAKTAPGKKRPVDSPDSTSGIGKKGQQPAKKRLNFGQTGDSESVPDPQPIGEPPAGPSGLGSGTMAAGGGAPMADNNEGADGVGNASGNWHCDSTWLGDRVITTSTRTWALPTYNNHLYKQISSQSAGSTNDNVYFGYSTPWGYFDFNRFHCHFSPRDWQRLINNNWGFRPKKLNFKLFNIQVKEVTTNDGVTTIANNLTSTVQVFSDSEYQLPYVLGSAHQGCLPPFPADVFMIPQYGYLTLNNGSQSVGRSSFYCLEYFPSQMLRTGNNFTFSYTFEDVPFHSSYAHSQSLDRLMNPLIDQYLYYLARTQSNAGGTAGNRELQFYQGGPTTMAEQAKNWLPGPCFRQQRVSKTLDQNNNSNFAWTGATKYHLNXRNSLVNPGVAMATHKDDEERFFPSSGVLIFGKTGAANKTTLENVLMTNEEEIRPTNPVATEEYGIVSSNLQAASTAAQTQVVNNQGALPGMVWQNRDVYLQGPIWAKIPHTDGNFHPSPLMGGFGLKHPPPQILIKNTPVPANPPEVFTPAKFASFITQYSTGQVSVEIEWELQKENSKRWNPEIQYTSNFDKQTGVDFAVDSQGVYSEP

SEQ ID NO: 17 - DNA, 1933 bp, Adeno-associated virus
caaggcctacgaccagcagctcaaagcgggtgacaatccgtacctgcggtataaccacgccgacgccgagtttcaggagtgtcttcaagaagatacgtcttttgggggcaacctcgggcgagcagtcttccaggccaaaaagcgggttctcgaacctcttggtctggttgagacgccagctaagacggcacctggaaagaagcgaccggtagactcgccagactccacctcgggcatcggcaagaaaggccagcagcccgcgaaaaagagactcaactttgggcagactggcgactcagagtcagtccccgaccctcaaccaatcggagaaccaccagcaggcccctctggtctgggatctggtacaatggttgcaggcggtggcgcaccaatggctgacaataacgagggcgccgacggagtgggtaatgcctcaggaaattggcattgcgattccacatggctgggcgacagagtcatcaccaccagcacccgaacctgggccctgcccacctacaacaaccacctctacaagcaaatctccagtcagtcagcagggagcaccaacgataacgtctatttcggctacagcaccccctgggggtattttgacttcaacagattccattgccacttctcaccacgtgactggcagcgacttatcaacaacaactggggattccggcccaagaagctcaacttcaagctcttcaacatccaggtcaaggaggtcacgacgaatgacggtgtcacaaccatcgctaataaccttaccagcacggttcaggtcttttcggactcggaatatcaactgccgtacgtcctcggctccgcgcaccagggctgcctgcctccgttcccggcagacgtgttcatgattccgcagtacggatacctgactctgaacaatggcagccaatcggtaggccgttcctccttctactgcctggagtactttccttctcagatgctgagaacgggcaacaacttcacctttagctacaccttcgaggacgtgcctttccacagcagctacgcgcacagccagagtctggaccggctgatgaatcccctcatcgaccagtacctgtactacttggccagaacacagagcaacgcaggaggtactgctggcaatcgggaactgcagttttatcagggcggacctaccaccatggccgaacaagcaaagaactggctgcccggaccttgcttccggcaacagagagtatccaagacgctggatcaaaataacaacagcaactttgcctggactggtgccacaaaataccatttaaatggaagaaattcattggttaatcccggtgtcgccatggcaacccacaaggacgacgaggaacgcttctccccttcgagcggagttctaatttttggcaaaactggagcagctaataaaactacattagaaaacgtgctcatgacaaatgaagaagaaattcgtcctaccaacccggtagctaccgaggaatacgggattgtaagcagcaacttgcaggcggctagcaccgcagcccagacacaagttgttaacaaccagggagccttacctggcatggtctggcagaaccgggacgtgtacctgcaaggtcccatttgggccaagattcctcacacggacggcaactttcacccgtctcctctaatgggtggctttggactgaaacacccgcctccccagatcctgatcaaaaacacgccggtacctgctaatcctccagaagtgtttactcctgccaagtttgcttccttcatcacgcagtacagcaccgggcaagtcagcgttgagatcgagtgggagctgcagaaagagaacagcaagcgctggaacccagagattcagtacacctccaactttgacaaacagactggagtggactttgctgttgacagccagggtgtttactctgagcct

SEQ ID NO: 18 - protein, 644 aa, Artificial Sequence
  Description of Artificial Sequence: Synthetic polypeptide
KAYDQQLKAGDNPYLRYNHADAEFQECLQEDTSFGGNLGRAVFQAKKRVLEPLGLVETPAKTAPGKKRPVDSPDSTSGIGKKGQQPAKKRLNFGQTGDSESVPDPQPIGEPPAGPSGLGSGTMVAGGGAPMADNNEGADGVGNASGNWHCDSTWLGDRVITTSTRTWALPTYNNHLYKQISSQSAGSTNDNVYFGYSTPWGYFDFNRFHCHFSPRDWQRLINNNWGFRPKKLNFKLFNIQVKEVTTNDGVTTIANNLTSTVQVFSDSEYQLPYVLGSAHQGCLPPFPADVFMIPQYGYLTLNNGSQSVGRSSFYCLEYFPSQMLRTGNNFTFSYTFEDVPFHSSYAHSQSLDRLMNPLIDQYLYYLARTQSNAGGTAGNRELQFYQGGPTTMAEQAKNWLPGPCFRQQRVSKTLDQNNNSNFAWTGATKYHLNGRNSLVNPGVAMATHKDDEERFSPSSGVLIFGKTGAANKTTLENVLMTNEEEIRPTNPVATEEYGIVSSNLQAASTAAQTQVVNNQGALPGMVWQNRDVYLQGPIWAKIPHTDGNFHPSPLMGGFGLKHPPPQILIKNTPVPANPPEVFTPAKFASFITQYSTGQVSVEIEWELQKENSKRWNPEIQYTSNFDKQTGVDFAVDSQGVYSEP

SEQ ID NO: 19 - DNA, 1933 bp, Adeno-associated virus
caaggcctacgaccagcagctcaaagcgggtgacaatccgtacctgcggtataaccacgccgacgccgagtttcaggagcgtcttcaagaagatacgtcttttgggggcaacctcgggcgagcagtcttccaggccaaaaagcgggttctcgaacctcttggtctggttgagacgccagctaagacggcacctggaaagaagcgaccggtagactcgccagactccacctcgggcatcggcaagaaaggccagcagcccgcgaaaaagagactcaactttgggcagactggcgactcagagccagtccccgaccctcaaccaatcggagaaccaccagcaggcccctctggtctgggatctggtacaatggctgcaggcggtggcgcaccaatggctgacaataacgagggcgccgacggagtgggtaatgcctcaggaaattggcattgcgattccacacggctgggcgacagagtcatcaccaccagcacccgaacctgggccctgcccacctacaacaaccacctctacaagcaaatctccagtcagtcagcagggagcaccaacgataacgtctatttcggctacagcaccccctgggggtattttgacttcaacagattccattgccacttctcaccacgtgactggcagcgacttatcaacaacaactggggattccggcccaagaagctcaacttcaagctcttcaacatccaggtcaaggaggtcacgacgaatgacggcgtcacaaccatcgctaataaccttaccagcacggttcaggtcttttcggactcggaatatcaactgccgtacgtcctcggctccgcgcaccagggctgcctgcctccgttcccggcagacgtgttcatgattccgcagtacggatacctgactctgaacaatggcagccaatcggtaggccgttcctccttctactgcctggagtactttccttctcagatgctgagaacgggcaacaacttcacctttagctacaccttcgaggacgtgcctttccacagcagctacgcgcacagccagagtctgggccggctgatgaatcccctcatcgaccagtacctgtactacttggccagaacacagagcaacgcaggaggtactgctggcaatcgggaactgcagttttatcagggcggacctaccaccatggccgaacaagcaaagaactggctgcccggaccttgcttccggcaacagagagtatccaagacgctggatcaaaataacaacagcaactttgcctggactggtgccacaaaataccatttaaatggaagaaattcattggttaatcccggtgtcgccatggcaacccacaaggacgacgaggaacgcttcttcccttcgagcggagttctaatttttggcaaaactggagcagctaataaaactacattagaaaacgtgctcatgacaaatgaagaagaaattcgtcctaccaacccggtagctaccgaggaatacgggattgtaagcagcaacttgcaggcggctagcaccgcagcccagacacaagttgttaacaaccagggagccttacctggcatggtctggcagaaccgggacgtgtacctgcaaggtcccatttgggccaagattcctcacacggacggcaactttcacccgtctcctctaatgggtggctttggactgaaacacccgcctccccagatcctgatcaaaaacacaccggtacctgctaatcctccagaagtgtttactcctgccaagtttgcttccttcatcacgcagtacagcaccgggcaagtcagcgttgagatcgaatgggagctgcagaaagagaacagcaagcgctggaacccagagattcagtacacctccaactttgacaaacagactggagtggactttgctgttgacagccagggtgtttactctgagcct

SEQ ID NO: 20 - protein, 644 aa, Artificial Sequence
  Description of Artificial Sequence: Synthetic polypeptide
KAYDQQLKAGDNPYLRYNHADAEFQERLQEDTSFGGNLGRAVFQAKKRVLEPLGLVETPAKTAPGKKRPVDSPDSTSGIGKKGQQPAKKRLNFGQTGDSEPVPDPQPIGEPPAGPSGLGSGTMAAGGGAPMADNNEGADGVGNASGNWHCDSTRLGDRVITTSTRTWALPTYNNHLYKQISSQSAGSTNDNVYFGYSTPWGYFDFNRFHCHFSPRDWQRLINNNWGFRPKKLNFKLFNIQVKEVTTNDGVTTIANNLTSTVQVFSDSEYQLPYVLGSAHQGCLPPFPADVFMIPQYGYLTLNNGSQSVGRSSFYCLEYFPSQMLRTGNNFTFSYTFEDVPFHSSYAHSQSLGRLMNPLIDQYLYYLARTQSNAGGTAGNRELQFYQGGPTTMAEQAKNWLPGPCFRQQRVSKTLDQNNNSNFAWTGATKYHLNGRNSLVNPGVAMATHKDDEERFFPSSGVLIFGKTGAANKTTLENVLMTNEEEIRPTNPVATEEYGIVSSNLQAASTAAQTQVVNNQGALPGMVWQNRDVYLQGPIWAKIPHTDGNFHPSPLMGGFGLKHPPPQILIKNTPVPANPPEVFTPAKFASFITQYSTGQVSVEIEWELQKENSKRWNPEIQYTSNFDKQTGVDFAVDSQGVYSEP

SEQ ID NO: 21 - DNA, 1933 bp, Adeno-associated virus; identical to SEQ ID NO: 19

SEQ ID NO: 22 - protein, 644 aa, Artificial Sequence; identical to SEQ ID NO: 20
  Description of Artificial Sequence: Synthetic polypeptide

SEQ ID NO: 23 - DNA, 1933 bp, Adeno-associated virus
caaggcctacgaccagcagctcaaagcgggtgacaatccgtacctgcggtataaccacgccgacgccgagtttcaggagcgtcttcaagaagatacgtcttttgggggcaacctcgggcgagcagtcttccaggccaaaaagcgggttctcgaacctcttggtctggttgagacgccagctaagacggcacctggaaagaagcgaccggtagactcgccagactccacctcgggcatcggcaagaaaggccagcagcccgcgaaaaagagactcaactttgggcagactggcgactcagagtcagtccccgaccctcaaccaatcggagaaccaccagcaggcccctctggtctgggatctggtacaatggctgcaggcggtggcgcaccaatggctgacaatagcgagggcgccgacggagtgggtaatgcctcaggaaattggcattgcgattccacatggctgggcgacagagtcatcaccaccagcacccgaacctgggccctgcccacctacaacaaccacctctacaagcaaatctccagtcagtcagcagggagcaccaacgataacgtctatttcggctacagcaccccctgggggtattttgacttcaacagattccattgccacttctcaccacgtgactggcagcgacttatcaacaacaactggggattccggcccaagaagctcaacttcaagctcttcaacatccaggtcaaggaggtcacgacgaatgacggtgtcacaaccatcgctaataaccttaccagcacggttcaggtcttttcggactcggaatatcaactgccgtacgtcctcggctccgcgcaccagggctgcctgcctccgttcccggcagacgtgttcatgattccgcagtacggatacctgactctgaacaatggcagccaatcggtaggccgttcctccttctactgcctggagtactttccttctcagatgctgagaacgggcaacaacttcacctttagctacaccttcgaggacgtgcctttccacagcagctacgcgcacagccagagtctggaccggctgatgaatcccctcatcgaccagtacctgtactacttggccagaacacagagcaacgcaggaggtactgctggcaatcgggaactgcagttttatcagggcggacctaccaccatggccgaacaagcaaagaactggctgcccggaccttgcttccggcaacagagagtatccaagacgctggatcaaaataacaacagcaactttgcctggactggtgccacaaaataccatttaaatggaagaaattcattggttaatcccggtgtcgccatggcaacccacaaggacgacgaggaacgcttcttcccttcgagcggagttctaatttttggcaaaactggagcagctaataaaactacattagaaaacgtgctcatgacaaatgaagaagaaattcgtcctaccaacccggtagctaccgaggaatacgggattgtaagcagcaacttgcaggcggctagcaccgcagcccagacacaagttgttaacaaccagggagccttacctggcatggtctggcagaaccgggacgtgtacctgcaaggtcccatttgggccaagattcctcacacggacggcaactttcacccgtctcctctaatgggtggctttggactgaaacacccgcctccccagatcctgatcaaaaacacaccggtacctgctaatcctccagaagtgtttactcctgccaagcttgcttccttcatcacgcagtacagcaccgggcaagtcagcgttgagatcgagtgggagctgcagaaagagaacagcaagcgctggaacccagagattcagtacacctccaactttgacaaacagactggagtggactttgctgttgacagccagggtgtttactctgagcct

SEQ ID NO: 24 - protein, 644 aa, Artificial Sequence
  Description of Artificial Sequence: Synthetic polypeptide
KAYDQQLKAGDNPYLRYNHADAEFQERLQEDTSFGGNLGRAVFQAKKRVLEPLGLVETPAKTAPGKKRPVDSPDSTSGIGKKGQQPAKKRLNFGQTGDSESVPDPQPIGEPPAGPSGLGSGTMAAGGGAPMADNSEGADGVGNASGNWHCDSTWLGDRVITTSTRTWALPTYNNHLYKQISSQSAGSTNDNVYFGYSTPWGYFDFNRFHCHFSPRDWQRLINNNWGFRPKKLNFKLFNIQVKEVTTNDGVTTIANNLTSTVQVFSDSEYQLPYVLGSAHQGCLPPFPADVFMIPQYGYLTLNNGSQSVGRSSFYCLEYFPSQMLRTGNNFTFSYTFEDVPFHSSYAHSQSLDRLMNPLIDQYLYYLARTQSNAGGTAGNRELQFYQGGPTTMAEQAKNWLPGPCFRQQRVSKTLDQNNNSNFAWTGATKYHLNGRNSLVNPGVAMATHKDDEERFFPSSGVLIFGKTGAANKTTLENVLMTNEEEIRPTNPVATEEYGIVSSNLQAASTAAQTQVVNNQGALPGMVWQNRDVYLQGPIWAKIPHTDGNFHPSPLMGGFGLKHPPPQILIKNTPVPANPPEVFTPAKLASFITQYSTGQVSVEIEWELQKENSKRWNPEIQYTSNFDKQTGVDFAVDSQGVYSEP

SEQ ID NO: 25 - DNA, 1933 bp, Adeno-associated virus
caaggcctacgaccagcagctcaaagcgggtgacaatccgtacctgcggtataaccacgccgacgccgagtttcaggagcgtcttcaagaagatacgtcttttgggggcaacctcgggcgagcagtcttccaggccaaaaagcgggttctcgaacctcttggtctggttgagacgccagctaagacggcacctggaaagaagcgaccggtagactcgccagactccacctcgggcatcggcaagaaaggccagcagcccgcgaaaaagagactcaactttgggcagactggcgactcagagtcagtccccgaccctcaaccaatcggagaaccaccagcaggcccctctggtctgggatctggtacaatggctgcaggcggtggcgcaccaatggctgacaataacgagggcgccgacggagtgggtaatgcctcaggaaattggcattgcgattccacatggctgggcgacagagtcatcaccaccagcacccgaacctgggccctgcccacctacaacaaccacctctacaagcaaatctccagtcagtcagcagggagcaccaacgataacgtctatttcggctacagcaccccctgggggtattttgacttcaacagattccattgccacttctcaccacgtgactggcagcgacttatcaacaacaactggggattccggcccaagaagctcaacttcaagctcttcaacatccaggtcaaggaggtcacgacgaatgacggcgtcacaaccatcgctaataaccttaccagcacggttcaggtcttttcggacccggaatatcaactgccgtacgtcctcggctccgcgcaccagggctgcctgcctccgttcccggcagacgtgttcatgattccgcagtacggatacctgactctgaacaatggcagccaatcggtaggccgttcctccttctactgcctggagtactttccttctcagatgctgagaacgggcaacaacttcacctttagctacaccttcgaggacgtgcctttccacagcagctacgcgcacagccagagtctggaccggctgatgaatcccctcatcgaccagtacctgtactacttggccagaacacagagcaacgcaggaggtactgctggcaatcgggaactgcagttttatcagggcggacctaccaccatggccgaacaagcaaagaactggctgcccggaccttgcttccggcaacagagagtatccaagacgctggatcaaaataacaacagcaactttgcctggactggtgccacaaaataccatttaaatggaagaaattcattggttaatcccggtgtcgccatggcaacccacaaggacgacgaggaacgcttcttcccttcgagcggagttctaatttttggcaaaactggagcagctaataaaactacattagaaaacgtgctcatgacaaatgaagaagaaattcgtcctaccaacccggtagctaccgaggaatacgggattgtaagcagcaacttgcaggcggctagcaccgcagcccagacacaagttgttaacaaccagggagccttacctggcatggtctggcagaaccgggacgtgtacctgcaaggtcccatttgggccaagattcctcacacggacggcaactttcacccgtctcctctaatgggtggctttggactgaaacacccgcctccccagatcctgatcaaaaacacaccggtacctgctaatcctccagaagtgtttactcctgccaagattgcttccttcatcacgcagtacagcaccgggcaagtcagcgttgagatcgagtgggagctgcagaaagagaacagcaagcgctggaacccagagattcagtacacctccaactttgacaaacagactggagtggactttgctgttgacagccagggtgtttactctgagcct

SEQ ID NO: 26 - protein, 644 aa, Artificial Sequence
  Description of Artificial Sequence: Synthetic polypeptide
KAYDQQLKAGDNPYLRYNHADAEFQERLQEDTSFGGNLGRAVFQAKKRVLEPLGLVETPAKTAPGKKRPVDSPDSTSGIGKKGQQPAKKRLNFGQTGDSESVPDPQPIGEPPAGPSGLGSGTMAAGGGAPMADNNEGADGVGNASGNWHCDSTWLGDRVITTSTRTWALPTYNNHLYKQISSQSAGSTNDNVYFGYSTPWGYFDFNRFHCHFSPRDWQRLINNNWGFRPKKLNFKLFNIQVKEVTTNDGVTTIANNLTSTVQVFSDPEYQLPYVLGSAHQGCLPPFPADVFMIPQYGYLTLNNGSQSVGRSSFYCLEYFPSQMLRTGNNFTFSYTFEDVPFHSSYAHSQSLDRLMNPLIDQYLYYLARTQSNAGGTAGNRELQFYQGGPTTMAEQAKNWLPGPCFRQQRVSKTLDQNNNSNFAWTGATKYHLNGRNSLVNPGVAMATHKDDEERFFPSSGVLIFGKTGAANKTTLENVLMTNEEEIRPTNPVATEEYGIVSSNLQAASTAAQTQVVNNQGALPGMVWQNRDVYLQGPIWAKIPHTDGNFHPSPLMGGFGLKHPPPQILIKNTPVPANPPEVFTPAKIASFITQYSTGQVSVEIEWELQKENSKRWNPEIQYTSNFDKQTGVDFAVDSQGVYSEP

SEQ ID NO: 27 - protein, 738 aa, Artificial Sequence
  Description of Artificial Sequence: Synthetic polypeptide
MAADGYLPDWLEDNLSEGIREWWALKPGAPKPKANQQKQDDGRGLVLPGYKYLGPFNGLDKGEPVNAADAAALEHDKAYDQQLKAGDNPYLRYNHADAEFQERLQEDTSFGGNLGRAVFQAKKRVLEPLGLVEEGAKTAPGKKRPVEPSPQRSPDSTTGIGKKGQQPAKKRLNFGQTGDSESVPDPQPIGEPPAGPSGLGSGTMAAGGGAPMADNNEGADGVGSSSGNWHCDSTWLGDRVITTSTRTWALPTYNNHLYKQISNGTSGGSTNDNTYFGYSTPWGYFDFNRFHCHFSPRDWQRLINNNWGFRPKRLNFKLFNIQVKEVTQNEGTKTIANNLTSTIQVFTDSEYQLPYVLGSARQGCLPPFPADVFMIPQYGYLTLNNGSQAVGRSSFYCLEYFPSQMLRTGNNFEFSYQFEDVPFHSSYAHSQSLDRLMNPLIDQYLYYLSRTQSTGGTAGTQQLLFSQAGPNNMSAQAKNWLPGPCYRQQRVSTTLSQNNNSNFAWTGATKYHLNGRDSLVNPGVAMATHKDDEERFFPSSGVLMFGKQGAGKGNVDYSSVMLTSEEEIKTTNPVATEQYGVVADNLQQQNAAPIVGAVNSQGALPGMVWQNRDVYLQGPIWAKIPHTDGNFHPSPLMGGFGLKHPPPQILIKNTPVPADPPTTFSQAKLASFITQYSTGQVSVEIEWELQKENSKRWNPEIQYTSNYYKSTNVDFAVNTDGTYSEPRPIGTRYLTRNL

SEQ ID NO: 28 - DNA, 3121 bp, Adeno-associated virus
gaattcgcccttctacggctgcgtcaactggaccaatgagaactttcccttcaacgactgtgtcgacaagatggtgatctggtgggaggaggggaagatgaccgccaaggtcgtggagtcggccaaagccattctcggaggaagcaaggtgcgcgtggaccagaaatgcaagtcctcggcccagatagacccgactcccgtgatcgtcacctccaacaccaacatgtgcgccgtgattgacgggaactcaacgaccttcgaacaccagcagccgttgcaagaccggatgttcaaatttgaactcacccgccgtctggatcatgactttgggaaggtcaccaagcaggaagtcaaagactttttccggtgggcaaaggatcacgtggttgaggtggagcacgaattctacgtcaaaaagggtggagccaagaaaagacccgcccccagtgacgcagatataagtgagcccaaacgggtgcgcgagtcagttgcgcagccatcgacgtcagacgcggaagcttcgatcaactacgcagacaggtaccaaaacaaatgttctcgtcacgcgggcatgaatctgatgctgtttccctgcagacaatgcgagagaatgaatcagaattcaaatatctgcttcactcacggacagaaagactgtttagagtgctttcccgtgtcagaatctcaacccgtttctgtcgtcaaaaaggcgtatcagaaactgtgctacattcatcatatcatgggaaaggtgccagacgcttgcactgcctgcgatctggtcgatgtggatttggatgactgcatctttgaacaataaatgatttaaatcaggtatggctgccgatggttatcttccagattggctcgaggacaacctctctgagggcattcgcgagtggtgggcgctgaaacctggagccccgaagcccaaagccaaccagcaaaagcaggacggcggccggggtctggtgcttcctggctacaagtacctcggacccttcaacggactcgacaagggggagcccgtcaacgcggcggacgcagcggccctcgagcacgacaaggcctacgaccagcagctcaaagcgggtgacaatccgtacctgcggtataaccacgccgacgccgagtttcaggagcgtctgcaagaagatacgtcttttgggggcaacctcgggcgagcagtcttccaggccaagaagcgggttctcgaacctctcggtctggttgaggaaggcgctaagacggctcctggaaagaagagaccggtagagccatcaccccagcgttctccagactcctctacgggcatcggcaagaaaggccagcagcccgcgaaaaagagactcaactttgggcagactggcgactcagagtcagtgcccgaccctcaaccaatcggagaaccccccgcaggcccctctggtctgggatctggtacaatggctgcaggcggtggcgctccaatggcagacaataacgaaggcgccgacggagtgggtagttcctcaggaaattggcattgcgattccacatggctgggcgactgagtcatcaccaccagcacccgaacctgggccctccccacctacaacaaccacctctacaagcaaatctccaacgggacttcgggaggaagcaccaacgacaacacctacttcggctacagcaccccctgggggtattttgactttaacagattccactgccacttctcaccacgtgactggcagcgactcatcaacaacaactggggattccggcccaagagactcaacttcaagctcttcaacatccaggtcaaggaggtcacgcagaatgaaggcaccaagaccatcgccaataaccttaccagcacgattcaggtctttacggactcggaataccagctcccgtacgtcctcggctctgcgcaccagggctgcctgcctccgttcccggcggacgtcttcatgattcctcagtacgggtacctgactctgaacaatggcagtcaggccgtgggccgttcctccttctactgcctggagtactttccttctcaaatgctgagaacgggcaacaactttgagttcagctaccagtttgaggacgtgccttttcacagcagctacgcgcacagccaaagcctggaccggctgatgaaccccctcatcgaccagtacctgtactacctgtctcggactcagtccacgggaggtaccgcaggaactcagcagttgctattttctcaggccgggcctaataacatgtcggctcaggccaaaaactggctacccgggccctgctaccggcagtaacgcgtctccacgacactgtcgcaaaataacaacagcaactttgtctggaccggtgccaccaagtatcatctgaatggcagagactctctggtagatcccggtgtcgctatggcaacccacaaggacgacgaagagcgattttttccgtccagcggagtcataatgtttgggaaacagggagctggaaaagacaacgtggactatagcagcgtcatgctaaccagtgaggaagaaattaaaaccaccaacccagtggccacagaacagtacggcgtggtggccgataacctgcaacagcaaaacgccgctcctattgtaggggccgtcaacagtcaaggagccttacctggcatggtctggcagaaccgggacgtgtacctgcagggtcctacctgggccaagattcctcacacggacggaaactttcatccctcgccgctgatgggaggctttggactgaaacacccgcctcctcagatcctgattaagaatacacctgttcccgcggatcctccaactaccttcagtcaagctaagctggcgtcgttcatcacgcagtacagcaccggacaggtcagcgtggaaattgaatgggagctgcaggaagaaaacagcaaacgctggaacccagagattcaatacacttccaactactacaaatctacaaatgtggactttgctgttaacacagatggcacttattctgagcctcgccccatcggcacccgttacctcacccgtaatctgtaattgcttgttaatcaataaaccggttgattcgtttcagttgaactttggtctctgcgaagggcgaattc

SEQ ID NO: 29 - protein, 738 aa, Artificial Sequence
  Description of Artificial Sequence: Synthetic polypeptide
MAADGYLPDWLEDNLSEGIREWWALKPGAPKPKANQQKQDDGRGLVLPGYKYLGPFNGLDKGEPVNAADAAALEHDKAYDQQLKAGDNPYLRYNHADAEFQERLQEDTSFGGNLGRAVFQAKKRVLEPLGLVEEGAKTAPGKKRPVEPSPQRSPDSSTGIGKKGQQPAKKRLNFGQTGDSESVPDPQPIGEPPAGPSGLGSGTMAAGGGAPMADNNEGADGVGSSSGNWHCDSTWLGDGVITTSTRTWALPTYNNHLYKQISNGTSGGSTNDNTYFGYSTPWGYFDFNRFHCHFSPRDWQRLINNNWGFRPKSLNFKLFNIQVKEVTQNEGTKTIANNLTSTIQVFTDSEYQLPYVLGSAHQGCLPPFPADVFMIPQYGYLTLNNGSQAVGRSSFYCLEYFPSQMLRTGNNFEFSYQFEDVPFHSSYAHSQSLDRLMNPLIDQYLYYLSRTQSTGGTAGTQQLLFSQAGPNNMSAQAKNWLPGPCYRQQRVSTTLSQNDNSNFAWTGATKYHLNGRDSLVNPGVAMATHKDDEERFFPSSGVLMFGKQGAGKDNVDYSSVMLTSEEEIKTTNPVATEQYGVVADNLQQQNAAPIVGAVNSQGALPGMVWQNRDVYLQGPIWAKIPHTDGNFHPSPLMGGFGLKHPPPQILIKNTPVPADPPTTFSQAKLASFITQYSTGQVSVEIEWELQKENSKRWNPEIQYTSNYYKSTNVDFAVNTDGTYSEPRPIGTRYLTRNL

SEQ ID NO: 30 - DNA, 3121 bp, Adeno-associated virus
gaattcgcccttcgcgagaccaaagttcaactgaaacgaatcaaccggtttattgattaacaagcaattacagattacgggtgaggtaacgggtgccgatggggcgaggctcagaataagtgccatctgtgttaacagcaaagtccacatttgtagatttgtagtagttggaagtgtattgaatctctgggttccagcgtttgctgttttctttctgcagctcccattcaatttccacgctgacctgtccggtgctgtactgcgtgatgaacgacgccagcttagcttgactgaaggtagttggaggatccgcgggaacaggtgtattcttaatcaggatctgaggaggcgggtgtttcagtccaaagcctcccatcagcggcgagggatgaaagtttccgtccgtgtgaggaatcttggcccagataggaccctgcaggtacacgtcccggttctgccagaccatgccaggtaaggctccttgactgttgacggcccctacaataggagcggcgttttgctgttgcaggttatcggccaccacgccgtactgttctgtggccactgggttggtggttttaatttcttcctcactggttagcataacgctgctatagtccacgttgtcttttccagctccctgtttcccaaacattaagactccgctggacggaaaaaatcgctcttcgtcgtccttgtgggttgccatagcgacaccgggatttaccagagagtctctgccattcagatgatacttggtggcaccggtccaggcaaagttgctgttgtcattttgcgacagtgtcgtggagacgcgttgctgccggtagcagggcccgggtagccagtttttggcctgagccgacatgttattaggcccggcctgagaaaatagcaactgctgagttcctgcggtacctcccgtggactgagtccgagacaggtagtacaggtactggtcgatgagggggttcatcagccggtccaggctttggctgtgcgcgtagctgctgtgaaaaggcacgtcctcaaactggtagctgaactcaaagttgttgcccgttctcagcatttgagaaggaaagtactccaggcagtagaaggaggaacggcccacggcctgactgccattgttcagagtcaggtacccgtactgaggaatcatgaagacgtccgccgggaacggaggcaggcagccctggtgcgcagagccgaggacgtacgggagctggtattccgagtccgtaaagacctgaatcgtgctggtaaggttattggcgatggtcttggtgccttcattctgcgtgacctccttgacctggatgttgaagagcttgaagttgaggctcttgggccggaatccccagttgttgttgatgagtcgctgccagtcacgtggtgagaagtggcagtggaatctgttaaagtcaaaatacccccagggggtgctgtagccgaagtaggtgttgtcgttggtgcttcctcccgaagtcccgttggagatttgcttgtagaggtggttgttgtaggtggggagggcccaggttcgggtgctggtggtgatgactccgtcgcccagccatgtggaatcgcaatgccaatttcctgaggaactacccactccgtcggcgccttcgttattgtctgccattggagcgccaccgcctgcagccattgtaccagatcccagaccagaggggcctgcggggggttctccgattggttgagggtcgggcactgactctgagtcgccagtctgcccaaagttgagtctctttttcgcgggctgctggcctttcttgccgatgcccgtagaggagtctggagaacgctggggtgatggctctaccggtctcttctttccaggagccgtcttagcgccttcctcaaccagaccgagaggttcgagaacccgcttcttggcctggaagactgctcgcccgaggttgcccccaaaagacgtatcttcttgcagacgctcctgaaactcggcgtcggcgtggttataccgcaggtacggattgtcacccgctttgagctgctggtcgtaggccttgtcgtgctcgagggccgctgcgtccgccgcgttgacgggctcccccttgtcgagtccgttgaagggtccgaggtacttgtagccaggaagcaccagaccccggccgtcgtcctgcttttgctggttggctttgggcttcggggctccaggtttcagcgcccaccactcgcgaatgccctcagagaggttgtcctcgagccaatctggaagataaccatcggcagccatacctgatttaaatcatttattgttcaaagatgcagtcatccaaatccacattgaccagatcgcaggcagtgcaagcgtctggcacctttcccatgatatgatgaatgtagcacagtttctgatacgcctttttgacgacagaaacgggttgagattctgacacgggaaagcactctaaacagtctttctgtccgtgagtgaagcagatatttgaattctgattcattctctcgcattgtctgcagggaaacagcatcagattcatgcccacgtgacgagaacatttgttttggtacctgtctgcgtagttgatcgaagcttccgcgtctgacgtcgatggctgcgcaactgactcgcgcacccgtttgggctcacttatatctgcgtcactgggggcgggtcttttcttggctccaccctttttgacgtagaattcatgctccacctcaaccacgtgatcctttgcccaccggaaaaagtctttgacttcctgcttggtgaccttcccaaagtcatgatccagacggcgggtgagttcaaatttgaacatccggtcttgcaacggctgctggtgttcgaaggtcgttgagttcccgtcaatcacggcgcacatgttggtgttggaggtgacgatcacgggagtcgggtctatctgggccgaggacttgcatttctggtccacgcgcaccttgcttcctccgagaatggctttggccgactccacgaccttggcggtcatcttcccctcctcccaccagatcaccatcttgtcgacacagtcgttgaagggaaagttctcattggtccagttgacgcagccgtagaaagggcgaattc

SEQ ID NO: 31 - DNA, 2211 bp, Adeno-associated virus
atggctgctgacggttatcttccagattggctcgaggacaacctttctgaaggcattcgtgagtggtgggctctgaaacctggagtccctcaacccaaagcgaaccaacaacaccaggacaaccgtcggggtcttgtgcttccgggttacaaatacctcggacccggtaacggactcgacaaaggagagccggtcaacgaggcggacgcggcagccctcgaacacgacaaagcttacgaccagcagctcaaggccggtgacaacccgtacctcaagtacaaccacgccgacgccgagtttcaggagcgtcttcaagaagatacgtcttttgggggcaaccttggcagagcagtcttccaggccaaaaagaggatccttgagcctcttggtctggttgaggaagcagctaaaacggctcctggaaagaagggggctgtagatcagtctcctcaggaaccggactcatcatctggtgttggcaaatcgggcaaacagcctgccagaaaaagactaaatttcggtcagactggagactcagagtcagtcccagaccctcaacctctcggagaaccaccagcagcccccacaagtttgggatctaatacaatggcttcaggcggtggcgcaccaatggcagacaataacgagggtgccgatggagtgggtaattcctcaggaaattggcattgcgattcccaatggctgggcgacagagtcatcaccaccagcaccagaacctgggccctgcccacttacaacaaccatctctacaagcaaatctccagccaatcaggagcttcaaacgacaaccactactttggctacagcaccccttgggggtattttgactttaacagattccactgccacttctcaccacgtgactggcagcgactcattaacaacaactggggattccggcccaagaaactcagcttcaagctcttcaacatccaagttagaggggtcacgcagaacgatggcacgacgactattgccaataaccttaccagcacggttcaagtgtttacggactcggagtatcagctcccgtacgtgctcgggtcggcgcaccaaggctgtctcccgccgtttccagcggacgtcttcatggtccctcagtatggatacctcaccctgaacaacggaagtcaagcggtgggacgctcatccttttactgcctggagtacttcccttcgcagatgctaaggactggaaataacttccaattcagctataccttcgaggatgtaccttttcacagcagctacgctcacagccagagtttggatcgcttgatgaatcctcttattgatcagtatctgtactacctgaacagaacgcaaggaacaacctctggaacaaccaaccaatcacggctgctttttagccaggctgggcctcagtctatgtctttgcaggccagaaattggctacctgggccctgctaccggcaacagagactttcaaagactgctaacgacaacaacaacagtaactttccttggacagcggccagcaaatatcatctcaatggccgcgactcgctggtgaatccaggaccagctatggccagtcacaaggacgatgaagaaaaatttttccctatgcacggcaatctaatatttggcaaagaagggacaacggcaagtaacgcagaattagataatgtaatgattacggatgaagaagagattcgtaccaccaatcctgtggcaacagagcagtatggaactgtggcaaataacttgcagagctcaaatacagctcccacgactggaactgtcaatcatcagggggccttacctggcatggtgtggcaagatcgtgacgtgtaccttcaaggacctatctgggcaaagattcctcacacggatggacactttcatccttctcctctgatgggaggctttggactgaaacatccgcctcctcaaatcatgatcaaaaatactccggtaccggcaaatcctccgacgactttcagcccggccaagtttgcttcatttatcactcagtactccactggacaggtcagcgtggaaattgagtgggagctacagaaagaaaacagcaaacgttggaatccagagattcagtacacttccaactacaacaagtctgttaatgtggactttactgtagacactaatggtgtttatagtgaacctcgccctattggaacccggtatctcacacgaaacttgtga

SEQ ID NO: 32 - protein, 736 aa, Adeno-associated virus 3
MAADGYLPDWLEDNLSEGIREWWALKPGVPQPKANQQHQDNRRGLVLPGYKYLGPGNGLDKGEPVNEADAAALEHDKAYDQQLKAGDNPYLKYNHADAEFQERLQEDTSFGGNLGRAVFQAKKRILEPLGLVEEAAKTAPGKKGAVDQSPQEPDSSSGVGKSGKQPARKRLNFGQTGDSESVPDPQPLGEPPAAPTSLGSNTMASGGGAPMADNNEGADGVGNSSGNWHCDSQWLGDRVITTSTRTWALPTYNNHLYKQISSQSGASNDNHYFGYSTPWGYFDFNRFHCHFSPRDWQRLINNNWGFRPKKLSFKLFNIQVRGVTQNDGTTTIANNLTSTVQVFTDSEYQLPYVLGSAHQGCLPPFPADVFMVPQYGYLTLNNGSQAVGRSSFYCLEYFPSQMLRTGNNFQFSYTFEDVPFHSSYAHSQSLDRLMNPLIDQYLYYLNRTQGTTSGTTNQSRLLFSQAGPQSMSLQARNWLPGPCYRQQRLSKTANDNNNSNFPWTAASKYHLNGRDSLVNPGPAMASHKDDEEKFFPMHGNLIFGKEGTTASNAELDNVMITDEEEIRTTNPVATEQYGTVANNLQSSNTAPTTGTVNHQGALPGMVWQDRDVYLQGPIWAKIPHTDGHFHPSPLMGGFGLKHPPPQIMIKNTPVPANPPTTFSPAKFASFITQYSTGQVSVEIEWELQKENSKRWNPEIQYTSNYNKSVNVDFTVDTNGVYSEPRPIGTRYLTRNL

SEQ ID NO: 33 - DNA, 4726 bp, Adeno-associated virus 3
ttggccactccctctatgcgcactcgctcgctcggtggggcctggcgaccaaaggtcgccagacggacgtgctttgcacgtccggccccaccgagcgagcgagtgcgcatagagggagtggccaactccatcactagaggtatggcagtgacgtaacgcgaagcgcgcgaagcgagaccacgcctaccagctgcgtcagcagtcaggtgacccttttgcgacagtttgcgacaccacgtggccgctgagggtatatattctcgagtgagcgaaccaggagctccattttgaccgcgaaatttgaacgagcagcagccatgccggggttctacgagattgtcctgaaggtcccgagtgacctggacgagcgcctgccgggcatttctaactcgtttgttaactgggtggccgagaaggaatgggacgtgccgccggattctgacatggatccgaatctgattgagcaggcacccctgaccgtggccgaaaagcttcagcgcgagttcctggtggagtggcgccgcgtgagtaaggccccggaggccctcttttttgtccagttcgaaaagggggagacctacttccacctgcacgtgctgattgagaccatcggggtcaaatccatggtggtcggccgctacgtgagccagattaaagagaagctggtgacccgcatctaccgcggggtcgagccgcagcttccgaactggttcgcggtgaccaaaacgcgaaatggcgccgggggcgggaacaaggtggtggacgactgctacatccccaactacctgctccccaagacccagcccgagctccagtgggcgtggactaacatggaccagtatttaagcgcctgtttgaatctcgcggagcgtaaacggctggtggcgcagcatctgacgcacgtgtcgcagacgcaggagcagaacaaagagaatcagaaccccaattctgacgcgccggtcatcaggtcaaaaacctcagccaggtacatggagctggtcgggtggctggtggaccgcgggatcacgtcagaaaagcaatggattcaggaggaccaggcctcgtacatctccttcaacgccgcctccaactcgcggtcccagatcaaggccgcgctggacaatgcctccaagatcatgagcctgacaaagacggctccggactacctggtgggcagcaacccgccggaggacattaccaaaaatcggatctaccaaatcctggagctgaacgggtacgatccgcagtacgcggcctccgtcttcctgggctgggcgcaaaagaagttcgggaagaggaacaccatctggctctttgggccggccacgacgggtaaaaccaacatcgcggaagccatcgcccacgccgtgcccttctacggctgcgtaaactggaccaatgagaactttcccttcaacgattgcgtcgacaagatggtgatctggtgggaggagggcaagatgacggccaaggtcgtggagagcgccaaggccattctgggcggaagcaaggtgcgcgtggaccaaaagtgcaagtcatcggcccagatcgaacccactcccgtgatcgtcacctccaacaccaacatgtgcgccgtgattgacgggaacagcaccaccttcgagcatcagcagccgctgcaggaccggatgtttgaatttgaacttacccgccgtttggaccatgactttgggaaggtcaccaaacaggaagtaaaggactttttccggtgggcttccgatcacgtgactgacgtggctcatgagttctacgtcagaaagggtggagctaagaaacgccccgcctccaatgacgcggatgtaagcgagccaaaacgggagtgcacgtcacttgcgcagccgacaacgtcagacgcggaagcaccggcggactacgcggacaggtaccaaaacaaatgttctcgtcacgtgggcatgaatctgatgctttttccctgtaaaacatgcgagagaatgaatcaaatttccaatgtctgttttacgcatggtcaaagagactgtggggaatgcttccctggaatgtcagaatctcaacccgtttctgtcgtcaaaaagaagacttatcagaaactgtgtccaattcatcatatcctgggaagggcacccgagattgcctgttcggcctgcgatttggccaatgtggacttggatgactgtgtttctgagcaataaatgacttaaaccaggtatggctgctgacggttatcttccagattggctcgaggacaacctttctgaaggcattcgtgagtggtgggctctgaaacctggagtccctcaacccaaagcgaaccaacaacaccaggacaaccgtcggggtcttgtgcttccgggttacaaatacctcggacccggtaacggactcgacaaaggagagccggtcaacgaggcggacgcggcagccctcgaacacgacaaagcttacgaccagcagctcaaggccggtgacaacccgtacctcaagtacaaccacgccgacgccgagtttcaggagcgtcttcaagaagatacgtcttttgggggcaaccttggcagagcagtcttccaggccaaaaagaggatccttgagcctcttggtctggttgaggaagcagctaaaacggctcctggaaagaagggggctgtagatcagtctcctcaggaaccggactcatcatctggtgttggcaaatcgggcaaacagcctgccagaaaaagactaaatttcggtcagactggagactcagagtcagtcccagaccctcaacctctcggagaaccaccagcagcccccacaagtttgggatctaatacaatggcttcaggcggtggcgcaccaatggcagacaataacgagggtgccgatggagtgggtaattcctcaggaaattggcattgcgattcccaatggctgggcgacagagtcatcaccaccagcaccagaacctgggccctgcccacttacaacaaccatctctacaagcaaatctccagccaatcaggagcttcaaacgacaaccactactttggctacagcaccccttgggggtattttgactttaacagattccactgccacttctcaccacgtgactggcagcgactcattaacaacaactggggattccggcccaagaaactcagcttcaagctcttcaacatccaagttagaggggtcacgcagaacgatggcacgacgactattgccaataaccttaccagcacggttcaagtgtttacggactcggagtatcagctcccgtacgtgctcgggtcggcgcaccaaggctgtctcccgccgtttccagcggacgtcttcatggtccctcagtatggatacctcaccctgaacaacggaagtcaagcggtgggacgctcatccttttactgcctggagtacttcccttcgcagatgctaaggactggaaataacttccaattcagctataccttcgaggatgtaccttttcacagcagctacgctcacagccagagtttggatcgcttgatgaatcctcttattgatcagtatctgtactacctgaacagaacgcaaggaacaacctctggaacaaccaaccaatcacggctgctttttagccaggctgggcctcagtctatgtctttgcaggccagaaattggctacctgggccctgctaccggcaacagagactttcaaagactgctaacgacaacaacaacagtaactttccttggacagcggccagcaaatatcatctcaatggccgcgactcgctggtgaatccaggaccagctatggccagtcacaaggacgatgaagaaaaatttttccctatgcacggcaatctaatatttggcaaagaagggacaacggcaagtaacgcagaattagataatgtaatgattacggatgaagaagagattcgtaccaccaatcctgtggcaacagagcagtatggaactgtggcaaataacttgcagagctcaaatacagctcccacgactggaactgtcaatcatcagggggccttacctggcatggtgtggcaagatcgtgacgtgtaccttcaaggacctatctgggcaaagattcctcacacggatggacactttcatccttctcctctgatgggaggctttggactgaaacatccgcctcctcaaatcatgatcaaaaatactccggtaccggcaaatcctccgacgactttcagcccggccaagtttgcttcatttatcactcagtactccactggacaggtcagcgtggaaattgagtgggagctacagaaagaaaacagcaaacgttggaatccagagattcagtacacttccaactacaacaagtctgttaatgtggactttactgtagacactaatggtgtttatagtgaacctcgccctattggaacccggtatctcacacgaaacttgtgaatcctggttaatcaataaaccgtttaattcgtttcagttgaactttggctcttgtgcacttctttatctttatcttgtttccatggctactgcgtagataagcagcggcctgcggcgcttgcgcttcgcggtttacaactgctggttaatatttaactctcgccatacctctagtgatggagttggccactccctctatgcgcactcgctcgctcggtggggcctggcgaccaaaggtcgccagacggacgtgctttgcacgtccggccccaccgagcgagcgagtgcgcatagagggagtggccaa

SEQ ID NO: 34 - protein, 737 aa, Artificial Sequence
  Description of Artificial Sequence: Synthetic polypeptide
MAADGYLPDWLEDNLSEGIREWWDLKPGAPKPKANQQKQDNGRGLVLPGYKYLGPFNGLDKGEPVNAADAAALEHDKAYDQQLNAGDNPYLRYNHADAEFQERLQEDTSFGGNLGRAVFQAKKRVLEPLGLVEEGAKTAPAKKRPVEPSPQRSPDSSTGIGKKGQQPARKRLNFGQTGDSESVPDPQPLGEPPAAPSSVGSGTVAAGGGAPMADNNEGADGVGNASGNWHCDSTWLGDRVITTSTRTWALPTYNNHLYEQISSETAGSTNDNTYFGYSTPWGYFDFNRFHCHFSPRDWQRLINNNWGFRPKKLRFKLFNIQVKEVTTNDGVTTIANNLTSTIQVFSDSEYQLPYVLGSAHQGCLPPFPADVFMIPQYGYLTLNNGSQSVGRSSFYCLEYFPSQMLRTGNNFEFSYSFEDVPFHSSYAHSQSLDRLMNPLIDQYLYYLARTQSDPGGTAGNRELQFYQGGPSTMAEQAKNWLPGPCFRQQRVSKTLDQNNNSNFAWTGATKYHLNGRNSLVNPGVAMATHKDDEDRFFPSSGVLIFGKTGATNKTTLENVLMTNEEEIRPTNPVATEEYGIVSSNLQAANTAAQTQVVNNQGALPGMVWQNRDVYLQGPIWAKIPHTDGNFHPSPLMGGFGLKHPPPQILIKNTPVPANPPEVFTPAKFASFITQYSTGQVSVEIEWELQKENSKRWDPEIQYTSNFEKQTGVDFAVDSQGVYSEPRPIGTRYLTRNL

SEQ ID NO: 35 - DNA, 2211 bp, Adeno-associated virus
atggctgctgacggttatcttccagattggctcgaggacaacctttctgaaggcattcgtgagtggtgggctctgaaacctggagtccctcaacccaaagcgaaccaacaacaccaggacaaccgtcggggtcttgtgcttccgggttacaaatacctcggacccggtaacggactcgacaaaggagagccggtcaacgaggcggacgcggcagccctcgaacacgacaaagcttacgaccagcagctcaaggccggtgacaacccgtacctcaagtacaaccacgccgacgccgagtttcaggagcgtcttcaagaagatacgtcttttgggggcaaccttggcagagcagtcttccaggccaaaaagaggatccttgagcctcttggtctggttgaggaagcagctaaaacggctcctggaaagaagggggctgtagatcagtctcctcaggaaccggactcatcatctggtgttggcaaatcgggcaaacagcctgccagaaaaagactaaatttcggtcagactggagactcagagtcagtcccagaccctcaacctctcggagaaccaccagcagcccccacaagtttgggatctaatacaatggcttcaggcggtggcgcaccaatggcagacaataacgagggtgccgatggagtgggtaattcctcaggaaattggcattgcgattcccaatggctgggcgacagagtcatcaccaccagcaccagaacctgggccctgcccacttacaacaaccatctctacaagcaaatctccagccaatcaggagcttcaaacgacaaccactactttggctacagcaccccttgggggtattttgactttaacagattccactgccacttctcaccacgtgactggcagcgactcattaacaacaactggggattccggcccaagaaactcagcttcaagctcttcaacatccaagttagaggggtcacgcagaacgatggcacgacgactattgccaataaccttaccagcacggttcaagtgtttacggactcggagtatcagctcccgtacgtgctcgggtcggcgcaccaaggctgtctcccgccgtttccagcggacgtcttcatggtccctcagtatggatacctcaccctgaacaacggaagtcaagcggtgggacgctcatccttttactgcctggagtacttcccttcgcagatgctaaggactggaaataacttccaattcagctataccttcgaggatgtaccttttcacagcagctacgctcacagccagagtttggatcgcttgatgaatcctcttattgatcagtatctgtactacctgaacagaacgcaaggaacaacctctggaacaaccaaccaatcacggctgctttttagccaggctgggcctcagtctatgtctttgcaggccagaaattggctacctgggccctgctaccggcaacagagactttcaaagactgctaacgacaacaacaacagtaactttccttggacagcggccagcaaatatcatctcaatggccgcgactcgctggtgaatccaggaccagctatggccagtcacaaggacgatgaagaaaaatttttccctatgcacggcaatctaatatttggcaaagaagggacaacggcaagtaacgcagaattagataatgtaatgattacggatgaagaagagattcgtaccaccaatcctgtggcaacagagcagtatggaactgtggcaaataacttgcagagctcaaatacagctcccacgactggaactgtcaatcatcagggggccttacctggcatggtgtggcaagatcgtgacgtgtaccttcaaggacctatctgggcaaagattcctcacacggatggacactttcatccttctcctctgatgggaggctttggactgaaacatccgcctcctcaaatcatgatcaaaaatactccggtaccggcaaatcctccgacgactttcagcccggccaagtttgcttcatttatcactcagtactccactggacaggtcagcgtggaaattgagtgggagctacagaaagaaaacagcaaacgttggaatccagagattcagtacacttccaactacaacaagtctgttaatgtggactttactgtagacactaatggtgtttatagtgaacctcgccctattggaacccggtatctcacacgaaacttgtaa

SEQ ID NO: 36 - protein, 736 aa, Adeno-associated virus; identical to SEQ ID NO: 32

SEQ ID NO: 37 - protein, 736 aa, Adeno-associated virus 3A; identical to SEQ ID NO: 32

SEQ ID NO: 38 - protein, 624 aa, Adeno-associated virus 3A
MPGFYEIVLKVPSDLDERLPGISNSFVNWVAEKEWDVPPDSDMDPNLIEQAPLTVAEKLQREFLVEWRRVSKAPEALFFVQFEKGETYFHLHVLIETIGVKSMVVGRYVSQIKEKLVTRIYRGVEPQLPNWFAVTKTRNGAGGGNKVVDDCYIPNYLLPKTQPELQWAWTNMDQYLSACLNLAERKRLVAQHLTHVSQTQEQNKENQNPNSDAPVIRSKTSARYMELVGWLVDRGITSEKQWIQEDQASYISFNAASNSRSQIKAALDNASKIMSLTKTAPDYLVGSNPPEDITKNRIYQILELNGYDPQYAASVFLGWAQKKFGKRNTIWLFGPATTGKTNIAEAIAHAVPFYGCVNWTNENFPFNDCVDKMVIWWEEGKMTAKVVESAKAILGGSKVRVDQKCKSSAQIEPTPVIVTSNTNMCAVIDGNSTTFEHQQPLQDRMFEFELTRRLDHDFGKVTKQEVKDFFRWASDHVTDVAHEFYVRKGGAKKRPASNDADVSEPKRECTSLAQPTTSDAEAPADYADRYQNKCSRHVGMNLMLFPCKTCERMNQISNVCFTHGQRDCGECFPGMSESQPVSVVKKKTYQKLCPIHHILGRAPEIACSACDLANVDLDDCVSEQ

SEQ ID NO: 39 - protein, 736 aa, Adeno-associated virus 3B
MAADGYLPDWLEDNLSEGIREWWALKPGVPQPKANQQHQDNRRGLVLPGYKYLGPGNGLDKGEPVNEADAAALEHDKAYDQQLKAGDNPYLKYNHADAEFQERLQEDTSFGGNLGRAVFQAKKRILEPLGLVEEAAKTAPGKKRPVDQSPQEPDSSSGVGKSGKQPARKRLNFGQTGDSESVPDPQPLGEPPAAPTSLGSNTMASGGGAPMADNNEGADGVGNSSGNWHCDSQWLGDRVITTSTRTWALPTYNNHLYKQISSQSGASNDNHYFGYSTPWGYFDFNRFHCHFSPRDWQRLINNNWGFRPKKLSFKLFNIQVKEVTQNDGTTTIANNLTSTVQVFTDSEYQLPYVLGSAHQGCLPPFPADVFMVPQYGYLTLNNGSQAVGRSSFYCLEYFPSQMLRTGNNFQFSYTFEDVPFHSSYAHSQSLDRLMNPLIDQYLYYLNRTQGTTSGTTNQSRLLFSQAGPQSMSLQARNWLPGPCYRQQRLSKTANDNNNSNFPWTAASKYHLNGRDSLVNPGPAMASHKDDEEKFFPMHGNLIFGKEGTTASNAELDNVMITDEEEIRTTNPVATEQYGTVANNLQSSNTAPTTRTVNDQGALPGMVWQDRDVYLQGPIWAKIPHTDGHFHPSPLMGGFGLKHPPPQIMIKNTPVPANPPTTFSPAKFASFITQYSTGQVSVEIEWELQKENSKRWNPEIQYTSNYNKSVNVDFTVDTNGVYSEPRPIGTRYLTRNL

SEQ ID NO: 40 - protein, 624 aa, Adeno-associated virus 3B
MPGFYEIVLKVPSDLDEHLPGISNSFVNWVAEKEWELPPDSDMDPNLIEQAPLTVAEKLQREFLVEWRRVSKAPEALFFVQFEKGETYFHLHVLIETIGVKSMVVGRYVSQIKEKLVTRIYRGVEPQLPNWFAVTKTRNGAGGGNKVVDDCYIPNYLLPKTQPELQWAWTNMDQYLSACLNLAERKRLVAQHLTHVSQTQEQNKENQNPNSDAPVIRSKTSARYMELVGWLVDRGITSEKQWIQEDQASYISFNAASNSRSQIKAALDNASKIMSLTKTAPDYLVGSNPPEDITKNRIYQILELNGYDPQYAASVFLGWAQKKFGKRNTIWLFGPATTGKTNIAEAIAHAVPFYGCVNWTNENFPFNDCVDKMVIWWEEGKMTAKVVESAKAILGGSKVRVDQKCKSSAQIEPTPVIVTSNTNMCAVIDGNSTTFEHQQPLQDRMFKFELTRRLDHDFGKVTKQEVKDFFRWASDHVTDVAHEFYVRKGGAKKRPASNDADVSEPKRQCTSLAQPTTSDAEAPADYADRYQNKCSRHVGMNLMLFPCKTCERMNQISNVCFTHGQRDCGECFPGMSESQPVSVVKKKTYQKLCPIHHILGRAPEIACSACDLANVDLDDCVSEQ

SEQ ID NO: 41 - DNA, 4722 bp, Adeno-associated virus 3B
tggccactccctctatgcgcactcgctcgctcggtggggcctggcgaccaaaggtcgccagacggacgtgctttgcacgtccggccccaccgagcgagcgagtgcgcatagagggagtggccaactccatcactagaggtatggcagtgacgtaacgcgaagcgcgcgaagcgagaccacgcctaccagctgcgtcagcagtcaggtgacccttttgcgacagtttgcgacaccacgtggccgctgagggtatatattctcgagtgagcgaaccaggagctccattttgaccgcgaaatttgaacgagcagcagccatgccggggttctacgagattgtcctgaaggtcccgagtgacctggacgagcacctgccgggcatttctaactcgtttgttaactgggtggccgagaaggaatgggagctgccgccggattctgacatggatccgaatctgattgagcaggcacccctgaccgtggccgaaaagcttcagcgcgagttcctggtggagtggcgccgcgtgagtaaggccccggaggccctcttttttgtccagttcgaaaagggggagacctacttccacctgcacgtgctgattgagaccatcggggtcaaatccatggtggtcggccgctacgtgagccagattaaagagaagctggtgacccgcatctaccgcggggtcgagccgcagcttccgaactggttcgcggtgaccaaaacgcgaaatggcgccgggggcgggaacaaggtggtggacgactgctacatccccaactacctgctccccaagacccagcccgagctccagtgggcgtggactaacatggaccagtatttaagcgcctgtttgaatctcgcggagcgtaaacggctggtggcgcagcatctgacgcacgtgtcgcagacgcaggagcagaacaaagagaatcagaaccccaattctgacgcgccggtcatcaggtcaaaaacctcagccaggtacatggagctggtcgggtggctggtggaccgcgggatcacgtcagaaaagcaatggattcaggaggaccaggcctcgtacatctccttcaacgccgcctccaactcgcggtcccagatcaaggccgcgctggacaatgcctccaagatcatgagcctgacaaagacggctccggactacctggtgggcagcaacccgccggaggacattaccaaaaatcggatctaccaaatcctggagctgaacgggtacgatccgcagtacgcggcctccgtcttcctgggctgggcgcaaaagaagttcgggaagaggaacaccatctggctctttgggccggccacgacgggtaaaaccaacatcgcggaagccatcgcccacgccgtgcccttctacggctgcgtaaactggaccaatgagaactttcccttcaacgattgcgtcgacaagatggtgatctggtgggaggagggcaagatgacggccaaggtcgtggagagcgccaaggccattctgggcggaagcaaggtgcgcgtggaccaaaagtgcaagtcatcggcccagatcgaacccactcccgtgatcgtcacctccaacaccaacatgtgcgccgtgattgacgggaacagcaccaccttcgagcatcagcagccgctgcaggaccggatgtttaaatttgaacttacccgccgtttggaccatgactttgggaaggtcaccaaacaggaagtaaaggactttttccggtgggcttccgatcacgtgactgacgtggctcatgagttctacgtcagaaagggtggagctaagaaacgccccgcctccaatgacgcggatgtaagcgagccaaaacggcagtgcacgtcacttgcgcagccgacaacgtcagacgcggaagcaccggcggactacgcggacaggtaccaaaacaaatgttctcgtcacgtgggcatgaatctgatgctttttccctgtaaaacatgcgagagaatgaatcaaatttccaatgtctgttttacgcatggtcaaagagactgtggggaatgcttccctggaatgtcagaatctcaacccgtttctgtcgtcaaaaagaagacttatcagaaactgtgtccaattcatcatatcctgggaagggcacccgagattgcctgttcggcctgcgatttggccaatgtggacttggatgactgtgtttctgagcaataaatgacttaaaccaggtatggctgctgacggttatcttccagattggctcgaggacaacctttctgaaggcattcgtgagtggtgggctctgaaacctggagtccctcaacccaaagcgaaccaacaacaccaggacaaccgtcggggtcttgtgcttccgggttacaaatacctcggacccggtaacggactcgacaaaggagagccggtcaacgaggcggacgcggcagccctcgaacacgacaaagcttacgaccagcagctcaaggccggtgacaacccgtacctcaagtacaaccacgccgacgccgagtttcaggagcgtcttcaagaagatacgtcttttgggggcaaccttggcagagcagtcttccaggccaaaaagaggatccttgagcctcttggtctggttgaggaagcagctaaaacggctcctggaaagaagaggcctgtagatcagtctcctcaggaaccggactcatcatctggtgttggcaaatcgggcaaacagcctgccagaaaaagactaaatttcggtcagactggcgactcagagtcagtcccagaccctcaacctctcggagaaccaccagcagcccccacaagtttgggatctaatacaatggcttcaggcggtggcgcaccaatggcagacaataacgagggtgccgatggagtgggtaattcctcaggaaattggcattgcgattcccaatggctgggcgacagagtcatcaccaccagcaccagaacctgggccctgcccacttacaacaaccatctctacaagcaaatctccagccaatcaggagcttcaaacgacaaccactactttggctacagcaccccttgggggtattttgactttaacagattccactgccacttctcaccacgtgactggcagcgactcattaacaacaactggggattccggcccaagaaactcagcttcaagctcttcaacatccaagttaaagaggtcacgcagaacgatggcacgacgactattgccaataaccttaccagcacggttcaagtgtttacggactcggagtatcagctcccgtacgtgctcgggtcggcgcaccaaggctgtctcccgccgtttccagcggacgtcttcatggtccctcagtatggatacctcaccctgaacaacggaagtcaagcggtgggacgctcatccttttactgcctggagtacttcccttcgcagatgctaaggactggaaataacttccaattcagctataccttcgaggatgtaccttttcacagcagctacgctcacagccagagtttggatcgcttgatgaatcctcttattgatcagtatctgtactacctgaacagaacgcaaggaacaacctctggaacaaccaaccaatcacggctgctttttagccaggctgggcctcagtctatgtctttgcaggccagaaattggctacctgggccctgctaccggcaacagagactttcaaagactgctaacgacaacaacaacagtaactttccttggacagcggccagcaaatatcatctcaatggccgcgactcgctggtgaatccaggaccagctatggccagtcacaaggacgatgaagaaaaatttttccctatgcacggcaatctaatatttggcaaagaagggacaacggcaagtaacgcagaattagataatgtaatgattacggatgaagaagagattcgtaccaccaatcctgtggcaacagagcagtatggaactgtggcaaataacttgcagagctcaaatacagctcccacgactagaactgtcaatgatcagggggccttacctggcatggtgtggcaagatcgtgacgtgtaccttcaaggacctatctgggcaaagattcctcacacggatggacactttcatccttctcctctgatgggaggctttggactgaaacatccgcctcctcaaatcatgatcaaaaatactccggtaccggcaaatcctccgacgactttcagcccggccaagtttgcttcatttatcactcagtactccactggacaggtcagcgtggaaattgagtgggagctacagaaagaaaacagcaaacgttggaatccagagattcagtacacttccaactacaacaagtctgttaatgtggactttactgtagacactaatggtgtttatagtgaacctcgccctattggaacccggtatctcacacgaaacttgtaatcctggttaatcaataaaccgtttaattcgtttcagttgaactttggctcttgtgcacttcttatcttatcttgtttccatggctactgcgtagataagcagcggcctgcggcgcttgcgcttcgcggtttacaactgctggttaatatttaactctcgccatacctctagtgatggagttggccactccctctatgcgcactcgctcgctcggtggggccggacgtgcaaagcacgtccgtctggcgacctttggtcgccaggccccaccgagcgagcgagtgcgcatagagggagtggccaa

SEQ ID NO: 42 - DNA, 1800 bp, Adeno-associated virus 4
  misc_feature (342)..(342): n is a, c, t, or g
acggctcctggaaagaagagaccgttgattgaatccccccagcagcccgactcctccacgggtatcggcaaaaaaggcaagcagccggctaaaaagaagctcgttttcgaagacgaaactggagcaggcgacggaccccctgagggatcaacttccggagccatgtctgatgacagtgagatgcgtgcagcagctggcggagctgcagtcgagggsggacaaggtgccgatggagtgggtaatgcctcgggtgattggcattgcgattccacctggtctgagggccacgtcacgaccaccagcaccagaacctgggtcttgcccacctacaacaaccacctntacaagcgactcggagagagcctgcagtccaacacctacaacggattctccaccccctggggatactttgacttcaaccgcttccactgccacttctcaccacgtgactggcagcgactcatcaacaacaactggggcatgcgacccaaagccatgcgggtcaaaatcttcaacatccaggtcaaggaggtcacgacgtcgaacggcgagacaacggtggctaataaccttaccagcacggttcagatctttgcggactcgtcgtacgaactgccgtacgtgatggatgcgggtcaagagggcagcctgcctccttttcccaacgacgtctttatggtgccccagtacggctactgtggactggtgaccggcaacacttcgcagcaacagactgacagaaatgccttctactgcctggagtactttccttcgcagatgctgcggactggcaacaactttgaaattacgtacagttttgagaaggtgcctttccactcgatgtacgcgcacagccagagcctggaccggctgatgaaccctctcatcgaccagtacctgtggggactgcaatcgaccaccaccggaaccaccctgaatgccgggactgccaccaccaactttaccaagctgcggcctaccaacttttccaactttaaaaagaactggctgcccgggccttcaatcaagcagcagggcttctcaaagactgccaatcaaaactacaagatccctgccaccgggtcagacagtctcatcaaatacgagacgcacagcactctggacggaagatggagtgccctgacccccggacctccaatggccacggctggacctgcggacagcaagttcagcaacagccagctcatctttgcggggcctaaacagaacggcaacacggccaccgtacccgggactctgatcttcacctctgaggaggagctggcagccaccaacgccaccgatacggacatgtggggcaacctacctggcggtgaccagagcaacagcaacctgccgaccgtggacagactgacagccttgggagccgtgcctggaatggtctggcaaaacagagacatttactaccagggtcccatttgggccaagattcctcataccgatggacactttcacccctcaccgctgattggtgggtttgggctgaaacacccgcctcctcaaatttttatcaagaacaccccggtacctgcgaatcctgcaacgaccttcagctctactccggtaaactccttcattactcagtacagcactggccaggtgtcggtgcagattgactgggagatccagaaggagcggtccaaacgctggaaccccgaggtccagtttacctccaactacggacagcaaaactctctgttgtgggctcccgatgcggctgggaaatacactgagcctagggctatcggtacccgctacctcacccaccacctgtaataa

SEQ ID NO: 43 - DNA, 2208 bp, Adeno-associated virus 4
  misc_feature (750)..(750): n is a, c, t, or g
atgactgacggttaccttccagattggctagaggacaacctctctgaaggcgttcgagagtggtgggcgctgcaacctggagcccctaaacccaaggcaaatcaacaacatcaggacaacgctcggggtcttgtgcttccgggttacaaatacctcggacccggcaacggactcgacaagggggaacccgtcaacgcagcggacgcggcagccctcgagcacgacaaggcctacgaccagcagctcaaggccggtgacaacccctacctcaagtacaaccacgccgacgcggagttccagcagcggcttcagggcgacacatcgtttgggggcaacctcggcagagcagtcttccaggccaaaaagagggttcttgaacctcttggtctggttgagcaagcgggtgagacggctcctggaaagaagagaccgttgattgaatccccccagcagcccgactcctccacgggtatcggcaaaaaaggcaagcagccggctaaaaagaagctcgttttcgaagacgaaactggagcaggcgacggaccccctgagggatcaacttccggagccatgtctgatgacagtgagatgcgtgcagcagctggcggagctgcagtcgagggsggacaaggtgccgatggagtgggtaatgcctcgggtgattggcattgcgattccacctggtctgagggccacgtcacgaccaccagcaccagaacctgggtcttgcccacctacaacaaccacctntacaagcgactcggagagagcctgcagtccaacacctacaacggattctccaccccctggggatactttgacttcaaccgcttccactgccacttctcaccacgtgactggcagcgactcatcaacaacaactggggcatgcgacccaaagccatgcgggtcaaaatcttcaacatccaggtcaaggaggtcacgacgtcgaacggcgagacaacggtggctaataaccttaccagcacggttcagatctttgcggactcgtcgtacgaactgccgtacgtgatggatgcgggtcaagagggcagcctgcctccttttcccaacgacgtctttatggtgccccagtacggctactgtggactggtgaccggcaacacttcgcagcaacagactgacagaaatgccttctactgcctggagtactttccttcgcagatgctgcggactggcaacaactttgaaattacgtacagttttgagaaggtgcctttccactcgatgtacgcgcacagccagagcctggaccggctgatgaaccctctcatcgaccagtacctgtggggactgcaatcgaccaccaccggaaccaccctgaatgccgggactgccaccaccaactttaccaagctgcggcctaccaacttttccaactttaaaaagaactggctgcccgggccttcaatcaagcagcagggcttctcaaagactgccaatcaaaactacaagatccctgccaccgggtcagacagtctcatcaaatacgagacgcacagcactctggacggaagatggagtgccctgacccccggacctccaatggccacggctggacctgcggacagcaagttcagcaacagccagctcatctttgcggggcctaaacagaacggcaacacggccaccgtacccgggactctgatcttcacctctgaggaggagctggcagccaccaacgccaccgatacggacatgtggggcaacctacctggcggtgaccagagcaacagcaacctgccgaccgtggacagactgacagccttgggagccgtgcctggaatggtctggcaaaacagagacatttactaccagggtcccatttgggccaagattcctcataccgatggacactttcacccctcaccgctgattggtgggtttgggctgaaacacccgcctcctcaaatttttatcaagaacaccccggtacctgcgaatcctgcaacgaccttcagctctactccggtaaactccttcattactcagtacagcactggccaggtgtcggtgcagattgactgggagatccagaaggagcggtccaaacgctggaaccccgaggtccagtttacctccaactacggacagcaaaactctctgttgtgggctcccgatgcggctgggaaatacactgagcctagggctatcggtacccgctacctcacccaccacctgtaataa

SEQ ID NO: 44 - DNA, 1872 bp, Adeno-associated virus 4
atgccggggttctacgagatcgtgctgaaggtgcccagcgacctggacgagcacctgcccggcatttctgactcttttgtgagctgggtggccgagaaggaatgggagctgccgccggattctgacatggacttgaatctgattgagcaggcacccctgaccgtggccgaaaagctgcaacgcgagttcctggtcgagtggcgccgcgtgagtaaggccccggaggccctcttctttgtccagttcgagaagggggacagctacttccacctgcacatcctggtggagaccgtgggcgtcaaatccatggtggtgggccgctacgtgagccagattaaagagaagctggtgacccgcatctaccgcggggtcgagccgcagcttccgaactggttcgcggtgaccaagacgcgtaatggcgccggaggcgggaacaaggtggtggacgactgctacatccccaactacctgctccccaagacccagcccgagctccagtgggcgtggactaacatggaccagtatataagcgcctgtttgaatctcgcggagcgtaaacggctggtggcgcagcatctgacgcacgtgtcgcagacgcaggagcagaacaaggaaaaccagaaccccaattctgacgcgccggtcatcaggtcaaaaacctccgccaggtacatggagctggtcgggtggctggtggaccgcgggatcacgtcagaaaagcaatggatccaggaggaccaggcgtcctacatctccttcaacgccgcctccaactcgcggtcacaaatcaaggccgcgctggacaatgcctccaaaatcatgagcctgacaaagacggctccggactacctggtgggccagaacccgccggaggacatttccagcaaccgcatctaccgaatcctcgagatgaacgggtacgatccgcagtacgcggcctccgtcttcctgggctgggcgcaaaagaagttcgggaagaggaacaccatctggctctttgggccggccacgacgggtaaaaccaacatcgcggaagccatcgcccacgccgtgcccttctacggctgcgtgaactggaccaatgagaactttccgttcaacgattgcgtcgacaagatggtgatctggtgggaggagggcaagatgacggccaaggtcgtagagagcgccaaggccatcctgggcggaagcaaggtgcgcgtggaccaaaagtgcaagtcatcggcccagatcgacccaactcccgtgatcgtcacctccaacaccaacatgtgcgcggtcatcgacggaaactcgaccaccttcgagcaccaacaaccactccaggaccggatgttcaagttcgagctcaccaagcgcctggagcacgactttggcaaggtcaccaagcaggaagtcaaagactttttccggtgggcgtcagatcacgtgaccgaggtgactcacgagttttacgtcagaaagggtggagctagaaagaggcccgcccccaatgacgcagatataagtgagcccaagcgggcctgtccgtcagttgcgcagccatcgacgtcagacgcggaagctccggtggactacgcggacaggtaccaaaacaaatgttctcgtcacgtgggtatgaatctgatgctttttccctgccggcaatgcgagagaatgaatcagaatgtggacatttgcttcacgcacggggtcatggactgtgccgagtgcttccccgtgtcagaatctcaacccgtgtctgtcgtcagaaagcggacgtatcagaaactgtgtccgattcatcacatcatggggagggcgcccgaggtggcctgctcggcctgcgaactggccaatgtggacttggatgactgtgacatggaacaataa

SEQ ID NO: 45 - DNA, 1611 bp, Adeno-associated virus 4
atgccggggttctacgagatcgtgctgaaggtgcccagcgacctggacgagcacctgcccggcatttctgactcttttgtgagctgggtggccgagaaggaatgggagctgccgccggattctgacatggacttgaatctgattgagcaggcacccctgaccgtggccgaaaagctgcaacgcgagttcctggtcgagtggcgccgcgtgagtaaggccccggaggccctcttctttgtccagttcgagaagggggacagctacttccacctgcacatcctggtggagaccgtgggcgtcaaatccatggtggtgggccgctacgtgagccagattaaagagaagctggtgacccgcatctaccgcggggtcgagccgcagcttccgaactggttcgcggtgaccaagacgcgtaatggcgccggaggcgggaacaaggtggtggacgactgctacatccccaactacctgctccccaagacccagcccgagctccagtgggcgtggactaacatggaccagtatataagcgcctgtttgaatctcgcggagcgtaaacggctggtggcgcagcatctgacgcacgtgtcgcagacgcaggagcagaacaaggaaaaccagaaccccaattctgacgcgccggtcatcaggtcaaaaacctccgccaggtacatggagctggtcgggtggctggtggaccgcgggatcacgtcagaaaagcaatggatccaggaggaccaggcgtcctacatctccttcaacgccgcctccaactcgcggtcacaaatcaaggccgcgctggacaatgcctccaaaatcatgagcctgacaaagacggctccggactacctggtgggccagaacccgccggaggacatttccagcaaccgcatctaccgaatcctcgagatgaacgggtacgatccgcagtacgcggcctccgtcttcctgggctgggcgcaaaagaagttcgggaagaggaacaccatctggctctttgggccggccacgacgggtaaaaccaacatcgcggaagccatcgcccacgccgtgcccttctacggctgcgtgaactggaccaatgagaactttccgttcaacgattgcgtcgacaagatggtgatctggtgggaggagggcaagatgacggccaaggtcgtagagagcgccaaggccatcctgggcggaagcaaggtgcgcgtggaccaaaagtgcaagtcatcggcccagatcgacccaactcccgtgatcgtcacctccaacaccaacatgtgcgcggtcatcgacggaaactcgaccaccttcgagcaccaacaaccactccaggaccggatgttcaagttcgagctcaccaagcgcctggagcacgactttggcaaggtcaccaagcaggaagtcaaagactttttccggtgggcgtcagatcacgtgaccgaggtgactcacgagttttacgtcagaaagggtggagctagaaagaggcccgcccccaatgacgcagatataagtgagcccaagcgggcctgtccgtcagttgcgcagccatcgacgtcagacgcggaagctccggtggactacgcggacagattggctagaggacaacctctctga

SEQ ID NO: 46 - DNA, 1872 bp, Adeno-associated virus 4; identical to SEQ ID NO: 44

SEQ ID NO: 47 - DNA, 1617 bp, Adeno-associated virus 4
  misc_feature (162)..(162): n is a, c, t, or g
atgcgtgcagcagctggcggagctgcagtcgagggsggacaaggtgccgatggagtgggtaatgcctcgggtgattggcattgcgattccacctggtctgagggccacgtcacgaccaccagcaccagaacctgggtcttgcccacctacaacaaccacctntacaagcgactcggagagagcctgcagtccaacacctacaacggattctccaccccctggggatactttgacttcaaccgcttccactgccacttctcaccacgtgactggcagcgactcatcaacaacaactggggcatgcgacccaaagccatgcgggtcaaaatcttcaacatccaggtcaaggaggtcacgacgtcgaacggcgagacaacggtggctaataaccttaccagcacggttcagatctttgcggactcgtcgtacgaactgccgtacgtgatggatgcgggtcaagagggcagcctgcctccttttcccaacgacgtctttatggtgccccagtacggctactgtggactggtgaccggcaacacttcgcagcaacagactgacagaaatgccttctactgcctggagtactttccttcgcagatgctgcggactggcaacaactttgaaattacgtacagttttgagaaggtgcctttccactcgatgtacgcgcacagccagagcctggaccggctgatgaaccctctcatcgaccagtacctgtggggactgcaatcgaccaccaccggaaccaccctgaatgccgggactgccaccaccaactttaccaagctgcggcctaccaacttttccaactttaaaaagaactggctgcccgggccttcaatcaagcagcagggcttctcaaagactgccaatcaaaactacaagatccctgccaccgggtcagacagtctcatcaaatacgagacgcacagcactctggacggaagatggagtgccctgacccccggacctccaatggccacggctggacctgcggacagcaagttcagcaacagccagctcatctttgcggggcctaaacagaacggcaacacggccaccgtacccgggactctgatcttcacctctgaggaggagctggcagccaccaacgccaccgatacggacatgtggggcaacctacctggcggtgaccagagcaacagcaacctgccgaccgtggacagactgacagccttgggagccgtgcctggaatggtctggcaaaacagagacatttactaccagggtcccatttgggccaagattcctcataccgatggacactttcacccctcaccgctgattggtgggtttgggctgaaacacccgcctcctcaaatttttatcaagaacaccccggtacctgcgaatcctgcaacgaccttcagctctactccggtaaactccttcattactcagtacagcactggccaggtgtcggtgcagattgactgggagatccagaaggagcggtccaaacgctggaaccccgaggtccagtttacctccaactacggacagcaaaactctctgttgtgggctcccgatgcggctgggaaatacactgagcctagggctatcggtacccgctacctcacccaccacctgtaa

SEQ ID NO: 48 - DNA, 939 bp, Adeno-associated virus 4
atggagctggtcgggtggctggtggaccgcgggatcacgtcagaaaagcaatggatccaggaggaccaggcgtcctacatctccttcaacgccgcctccaactcgcggtcacaaatcaaggccgcgctggacaatgcctccaaaatcatgagcctgacaaagacggctccggactacctggtgggccagaacccgccggaggacatttccagcaaccgcatctaccgaatcctcgagatgaacgggtacgatccgcagtacgcggcctccgtcttcctgggctgggcgcaaaagaagttcgggaagaggaacaccatctggctctttgggccggccacgacgggtaaaaccaacatcgcggaagccatcgcccacgccgtgcccttctacggctgcgtgaactggaccaatgagaactttccgttcaacgattgcgtcgacaagatggtgatctggtgggaggagggcaagatgacggccaaggtcgtagagagcgccaaggccatcctgggcggaagcaaggtgcgcgtggaccaaaagtgcaagtcatcggcccagatcgacccaactcccgtgatcgtcacctccaacaccaacatgtgcgcggtcatcgacggaaactcgaccaccttcgagcaccaacaaccactccaggaccggatgttcaagttcgagctcaccaagcgcctggagcacgactttggcaaggtcaccaagcaggaagtcaaagactttttccggtgggcgtcagatcacgtgaccgaggtgactcacgagttttacgtcagaaagggtggagctagaaagaggcccgcccccaatgacgcagatataagtgagcccaagcgggcctgtccgtcagttgcgcagccatcgacgtcagacgcggaagctccggtggactacgcggacagattggctagaggacaacctctctga

SEQ ID NO: 49 - DNA, 1197 bp, Adeno-associated virus 4
atggagctggtcgggtggctggtggaccgcgggatcacgtcagaaaagcaatggatccaggaggaccaggcgtcctacatctccttcaacgccgcctccaactcgcggtcacaaatcaaggccgcgctggacaatgcctccaaaatcatgagcctgacaaagacggctccggactacctggtgggccagaacccgccggaggacatttccagcaaccgcatctaccgaatcctcgagatgaacgggtacgatccgcagtacgcggcctccgtcttcctgggctgggcgcaaaagaagttcgggaagaggaacaccatctggctctttgggccggccacgacgggtaaaaccaacatcgcggaagccatcgcccacgccgtgcccttctacggctgcgtgaactggaccaatgagaactttccgttcaacgattgcgtcgacaagatggtgatctggtgggaggagggcaagatgacggccaaggtcgtagagagcgccaaggccatcctgggcggaagcaaggtgcgcgtggaccaaaagtgcaagtcatcggcccagatcgacccaactcccgtgatcgtcacctccaacaccaacatgtgcgcggtcatcgacggaaactcgaccaccttcgagcaccaacaaccactccaggaccggatgttcaagttcgagctcaccaagcgcctggagcacgactttggcaaggtcaccaagcaggaagtcaaagactttttccggtgggcgtcagatcacgtgaccgaggtgactcacgagttttacgtcagaaagggtggagctagaaagaggcccgcccccaatgacgcagatataagtgagcccaagcgggcctgtccgtcagttgcgcagccatcgacgtcagacgcggaagctccggtggactacgcggacaggtaccaaaacaaatgttctcgtcacgtgggtatgaatctgatgctttttccctgccggcaatgcgagagaatgaatcagaatgtggacatttgcttcacgcacggggtcatggactgtgccgagtgcttccccgtgtcagaatctcaacccgtgtctgtcgtcagaaagcggacgtatcagaaactgtgtccgattcatcacatcatggggagggcgcccgaggtggcctgctcggcctgcgaactggccaatgtggacttggatgactgtgacatggaacaa

SEQ ID NO: 50 - DNA, 245 bp, Adeno-associated virus 4
ctccatcatctaggtttgcccactgacgtcaatgtgacgtcctagggttagggaggtccctgtattagcagtcacgtgagtgtcgtatttcgcggagcgtagcggagcgcataccaagctgccacgtcacagccacgtggtccgtttgcgacagtttgcgacaccatgtggtcaggagggtatataaccgcgagtgagccagcgaggagctccattttgcccgcgaattttgaacgagcagcagc

SEQ ID NO: 51 - protein, 313 aa, Adeno-associated virus 4
  MOD_RES (313)..(313): Xaa = any amino acid
MELVGWLVDRGITSEKQWIQEDQASYISFNAASNSRSQIKAALDNASKIMSLTKTAPDYLVGQNPPEDISSNRIYRILEMNGYDPQYAASVFLGWAQKKFGKRNTIWLFGPATTGKTNIAEAIAHAVPFYGCVNWTNENFPFNDCVDKMVIWWEEGKMTAKVVESAKAILGGSKVRVDQKCKSSAQIDPTPVIVTSNTNMCAVIDGNSTTFEHQQPLQDRMFKFELTKRLEHDFGKVTKQEVKDFFRWASDHVTEVTHEFYVRKGGARKRPAPNDADISEPKRACPSVAQPSTSDAEAPVDYADRLARGQPLX

SEQ ID NO: 52 - protein, 399 aa, Adeno-associated virus 4
MELVGWLVDRGITSEKQWIQEDQASYISFNAASNSRSQIKAALDNASKIMSLTKTAPDYLVGQNPPEDISSNRIYRILEMNGYDPQYAASVFLGWAQKKFGKRNTIWLFGPATTGKTNIAEAIAHAVPFYGCVNWTNENFPFNDCVDKMVIWWEEGKMTAKVVESAKAILGGSKVRVDQKCKSSAQIDPTPVIVTSNTNMCAVIDGNSTTFEHQQPLQDRMFKFELTKRLEHDFGKVTKQEVKDFFRWASDHVTEVTHEFYVRKGGARKRPAPNDADISEPKRACPSVAQPSTSDAEAPVDYADRYQNKCSRHVGMNLMLFPCRQCERMNQNVDICFTHGVMDCAECFPVSESQPVSVVRKRTYQKLCPIHHIMGRAPEVACSACELANVDLDDCDMEQ

SEQ ID NO: 53 - protein, 623 aa, Adeno-associated virus 4
MPGFYEIVLKVPSDLDEHLPGISDSFVSWVAEKEWELPPDSDMDLNLIEQAPLTVAEKLQREFLVEWRRVSKAPEALFFVQFEKGDSYFHLHILVETVGVKSMVVGRYVSQIKEKLVTRIYRGVEPQLPNWFAVTKTRNGAGGGNKVVDDCYIPNYLLPKTQPELQWAWTNMDQYISACLNLAERKRLVAQHLTHVSQTQEQNKENQNPNSDAPVIRSKTSARYMELVGWLVDRGITSEKQWIQEDQASYISFNAASNSRSQIKAALDNASKIMSLTKTAPDYLVGQNPPEDISSNRIYRILEMNGYDPQYAASVFLGWAQKKFGKRNTIWLFGPATTGKTNIAEAIAHAVPFYGCVNWTNENFPFNDCVDKMVIWWEEGKMTAKVVESAKAILGGSKVRVDQKCKSSAQIDPTPVIVTSNTNMCAVIDGNSTTFEHQQPLQDRMFKFELTKRLEHDFGKVTKQEVKDFFRWASDHVTEVTHEFYVRKGGARKRPAPNDADISEPKRACPSVAQPSTSDAEAPVDYADRYQNKCSRHVGMNLMLFPCRQCERMNQNVDICFTHGVMDCAECFPVSESQPVSVVRKRTYQKLCPIHHIMGRAPEVACSACELANVDLDDCDMEQ

SEQ ID NO: 54 - protein, 537 aa, Adeno-associated virus 4
  MOD_RES (537)..(537): Xaa = any amino acid
MPGFYEIVLKVPSDLDEHLPGISDSFVSWVAEKEWELPPDSDMDLNLIEQAPLTVAEKLQREFLVEWRRVSKAPEALFFVQFEKGDSYFHLHILVETVGVKSMVVGRYVSQIKEKLVTRIYRGVEPQLPNWFAVTKTRNGAGGGNKVVDDCYIPNYLLPKTQPELQWAWTNMDQYISACLNLAERKRLVAQHLTHVSQTQEQNKENQNPNSDAPVIRSKTSARYMELVGWLVDRGITSEKQWIQEDQASYISFNAASNSRSQIKAALDNASKIMSLTKTAPDYLVGQNPPEDISSNRIYRILEMNGYDPQYAASVFLGWAQKKFGKRNTIWLFGPATTGKTNIAEAIAHAVPFYGCVNWTNENFPFNDCVDKMVIWWEEGKMTAKVVESAKAILGGSKVRVDQKCKSSAQIDPTPVIVTSNTNMCAVIDGNSTTFEHQQPLQDRMFKFELTKRLEHDFGKVTKQEVKDFFRWASDHVTEVTHEFYVRKGGARKRPAPNDADISEPKRACPSVAQPSTSDAEAPVDYADRLARGQPLX

SEQ ID NO: 55 - protein, 623 aa, Adeno-associated virus 4; identical to SEQ ID NO: 53

SEQ ID NO: 56 - protein, 544 aa, Adeno-associated virus 4
MSDDSEMRAAAGGAAVEGGQGADGVGNASGDWHCDSTWSEGHVTTTSTRTWVLPTYNNHLYKRLGESLQSNTYNGFSTPWGYFDFNRFHCHFSPRDWQRLINNNWGMRPKAMRVKIFNIQVKEVTTSNGETTVANNLTSTVQIFADSSYELPYVMDAGQEGSLPPFPNDVFMVPQYGYCGLVTGNTSQQQTDRNAFYCLEYFPSQMLRTGNNFEITYSFEKVPFHSMYAHSQSLDRLMNPLIDQYLWGLQSTTTGTTLNAGTATTNFTKLRPTNFSNFKKNWLPGPSIKQQGFSKTANQNYKIPATGSDSLIKYETHSTLDGRWSALTPGPPMATAGPADSKFSNSQLIFAGPKQNGNTATVPGTLIFTSEEELAATNATDTDMWGNLPGGDQSNSNLPTVDRLTALGAVPGMVWQNRDIYYQGPIWAKIPHTDGHFHPSPLIGGFGLKHPPPQIFIKNTPVPANPATTFSSTPVNSFITQYSTGQVSVQIDWEIQKERSKRWNPEVQFTSNYGQQNSLLWAPDAAGKYTEPRAIGTRYLTHHL

SEQ ID NO: 57 - protein, 734 aa, Adeno-associated virus 4
MTDGYLPDWLEDNLSEGVREWWALQPGAPKPKANQQHQDNARGLVLPGYKYLGPGNGLDKGEPVNAADAAALEHDKAYDQQLKAGDNPYLKYNHADAEFQQRLQGDTSFGGNLGRAVFQAKKRVLEPLGLVEQAGETAPGKKRPLIESPQQPDSSTGIGKKGKQPAKKKLVFEDETGAGDGPPEGSTSGAMSDDSEMRAAAGGAAVEGGQGADGVGNASGDWHCDSTWSEGHVTTTSTRTWVLPTYNNHLYKRLGESLQSNTYNGFSTPWGYFDFNRFHCHFSPRDWQRLINNNWGMRPKAMRVKIFNIQVKEVTTSNGETTVANNLTSTVQIFADSSYELPYVMDAGQEGSLPPFPNDVFMVPQYGYCGLVTGNTSQQQTDRNAFYCLEYFPSQMLRTGNNFEITYSFEKVPFHSMYAHSQSLDRLMNPLIDQYLWGLQSTTTGTTLNAGTATTNFTKLRPTNFSNFKKNWLPGPSIKQQGFSKTANQNYKIPATGSDSLIKYETHSTLDGRWSALTPGPPMATAGPADSKFSNSQLIFAGPKQNGNTATVPGTLIFTSEEELAATNATDTDMWGNLPGGDQSNSNLPTVDRLTALGAVPGMVWQNRDIYYQGPIWAKIPHTDGHFHPSPLIGGFGLKHPPPQIFIKNTPVPANPATTFSSTPVNSFITQYSTGQVSVQIDWEIQKERSKRWNPEVQFTSNYGQQNSLLWAPDAAGKYTEPRAIGTRYLTHHL

SEQ ID NO: 58 - protein, 598 aa, Adeno-associated virus 4
TAPGKKRPLIESPQQPDSSTGIGKKGKQPAKKKLVFEDETGAGDGPPEGSTSGAMSDDSEMRAAAGGAAVEGGQGADGVGNASGDWHCDSTWSEGHVTTTSTRTWVLPTYNNHLYKRLGESLQSNTYNGFSTPWGYFDFNRFHCHFSPRDWQRLINNNWGMRPKAMRVKIFNIQVKEVTTSNGETTVANNLTSTVQIFADSSYELPYVMDAGQEGSLPPFPNDVFMVPQYGYCGLVTGNTSQQQTDRNAFYCLEYFPSQMLRTGNNFEITYSFEKVPFHSMYAHSQSLDRLMNPLIDQYLWGLQSTTTGTTLNAGTATTNFTKLRPTNFSNFKKNWLPGPSIKQQGFSKTANQNYKIPATGSDSLIKYETHSTLDGRWSALTPGPPMATAGPADSKFSNSQLIFAGPKQNGNTATVPGTLIFTSEEELAATNATDTDMWGNLPGGDQSNSNLPTVDRLTALGAVPGMVWQNRDIYYQGPIWAKIPHTDGHFHPSPLIGGFGLKHPPPQIFIKNTPVPANPATTFSSTPVNSFITQYSTGQVSVQIDWEIQKERSKRWNPEVQFTSNYGQQNSLLWAPDAAGKYTEPRAIGTRYLTHHL

SEQ ID NO: 59 - DNA, 129 bp, Adeno-associated virus 4
ttggccactccctctatgcgcgctcgctcactcactcggccctgcggccagaggccggcagtctggagacctttggtgtccagggcagggccgagtgagtgagcgagcgcgcatagagggagtggccaa

SEQ ID NO: 60 - DNA, 125 bp, Adeno-associated virus 4
ttggccactccctctatgcgcgctcgctcactcactcggccctggagaccaaaggtctccagactgccggcctctggccggcagggccgagtgagtgagcgagcgcgcatagagggagtggccaa

SEQ ID NO: 61 - DNA, 4768 bp, Adeno-associated virus 4
  misc_feature (3009)..(3009): n is a, c, t, or g
ttggccactccctctatgcgcgctcgctcactcactcggccctggagaccaaaggtctccagactgccggcctctggccggcagggccgagtgagtgagcgagcgcgcatagagggagtggccaactccatcatctaggtttgcccactgacgtcaatgtgacgtcctagggttagggaggtccctgtattagcagtcacgtgagtgtcgtatttcgcggagcgtagcggagcgcataccaagctgccacgtcacagccacgtggtccgtttgcgacagtttgcgacaccatgtggtcaggagggtatataaccgcgagtgagccagcgaggagctccattttgcccgcgaattttgaacgagcagcagccatgccggggttctacgagatcgtgctgaaggtgcccagcgacctggacgagcacctgcccggcatttctgactcttttgtgagctgggtggccgagaaggaatgggagctgccgccggattctgacatggacttgaatctgattgagcaggcacccctgaccgtggccgaaaagctgcaacgcgagttcctggtcgagtggcgccgcgtgagtaaggccccggaggccctcttctttgtccagttcgagaagggggacagctacttccacctgcacatcctggtggagaccgtgggcgtcaaatccatggtggtgggccgctacgtgagccagattaaagagaagctggtgacccgcatctaccgcggggtcgagccgcagcttccgaactggttcgcggtgaccaagacgcgtaatggcgccggaggcgggaacaaggtggtggacgactgctacatccccaactacctgctccccaagacccagcccgagctccagtgggcgtggactaacatggaccagtatataagcgcctgtttgaatctcgcggagcgtaaacggctggtggcgcagcatctgacgcacgtgtcgcagacgcaggagcagaacaaggaaaaccagaaccccaattctgacgcgccggtcatcaggtcaaaaacctccgccaggtacatggagctggtcgggtggctggtggaccgcgggatcacgtcagaaaagcaatggatccaggaggaccaggcgtcctacatctccttcaacgccgcctccaactcgcggtcacaaatcaaggccgcgctggacaatgcctccaaaatcatgagcctgacaaagacggctccggactacctggtgggccagaacccgccggaggacatttccagcaaccgcatctaccgaatcctcgagatgaacgggtacgatccgcagtacgcggcctccgtcttcctgggctgggcgcaaaagaagttcgggaagaggaacaccatctggctctttgggccggccacgacgggtaaaaccaacatcgcggaagccatcgcccacgccgtgcccttctacggctgcgtgaactggaccaatgagaactttccgttcaacgattgcgtcgacaagatggtgatctggtgggaggagggcaagatgacggccaaggtcgtagagagcgccaaggccatcctgggcggaagcaaggtgcgcgtggaccaaaagtgcaagtcatcggcccagatcgacccaactcccgtgatcgtcacctccaacaccaacatgtgcgcggtcatcgacggaaactcgaccaccttcgagcaccaacaaccactccaggaccggatgttcaagttcgagctcaccaagcgcctggagcacgactttggcaaggtcaccaagcaggaagtcaaagactttttccggtgggcgtcagatcacgtgaccgaggtgactcacgagttttacgtcagaaagggtggagctagaaagaggcccgcccccaatgacgcagatataagtgagcccaagcgggcctgtccgtcagttgcgcagccatcgacgtcagacgcggaagctccggtggactacgcggacaggtaccaaaacaaatgttctcgtcacgtgggtatgaatctgatgctttttccctgccggcaatgcgagagaatgaatcagaatgtggacatttgcttcacgcacggggtcatggactgtgccgagtgcttccccgtgtcagaatctcaacccgtgtctgtcgtcagaaagcggacgtatcagaaactgtgtccgattcatcacatcatggggagggcgcccgaggtggcctgctcggcctgcgaactggccaatgtggacttggatgactgtgacatggaacaataaatgactcaaaccagatatgactgacggttaccttccagattggctagaggacaacctctctgaaggcgttcgagagtggtgggcgctgcaacctggagcccctaaacccaaggcaaatcaacaacatcaggacaacgctcggggtcttgtgcttccgggttacaaatacctcggacccggcaacggactcgacaagggggaacccgtcaacgcagcggacgcggcagccctcgagcacgacaaggcctacgaccagcagctcaaggccggtgacaacccctacctcaagtacaaccacgccgacgcggagttccagcagcggcttcagggcgacacaccgtttgggggcaacctcggcagagcagtcttccaggccaaaaagagggttcttgaacctcttggtctggttgagcaagcgggtgagacggctcctggaaagaagagaccgttgattgaatccccccagcagcccgactcctccacgggtatcggcaaaaaaggcaagcagccggctaaaaagaagctcgttttcgaagacgaaactggagcaggcgacggaccccctgagggatcaacttccggagccatgtctgatgacagtgagatgcgtgcagcagctggcggagctgcagtcgagggsggacaaggtgccgatggagtgggtaatgcctcgggtgattggcattgcgattccacctggtctgagggccacgtcacgaccaccagcaccagaacctgggtcttgcccacctacaacaaccacctntacaagcgactcggagagagcctgcagtccaacacctacaacggattctccaccccctggggatactttgacttcaaccgcttccactgccacttctcaccacgtgactggcagcgactcatcaacaacaactggggcatgcgacccaaagccatgcgggtcaaaatcttcaacatccaggtcaaggaggtcacgacgtcgaacggcgagacaacggtggctaataaccttaccagcacggttcagatctttgcggactcgtcgtacgaactgccgtacgtgatggatgcgggtcaagagggcagcctgcctccttttcccaacgacgtctttatggtgccccagtacggctactgtggactggtgaccggcaacacttcgcagcaacagactgacagaaatgccttctactgcctggagtactttccttcgcagatgctgcggactggcaacaactttgaaattacgtacagttttgagaaggtgcctttccactcgatgtacgcgcacagccagagcctggaccggctgatgaaccctctcatcgaccagtacctgtggggactgcaatcgaccaccaccggaaccaccctgaatgccgggactgccaccaccaactttaccaagctgcggcctaccaacttttccaactttaaaaagaactggctgcccgggccttcaatcaagcagcagggcttctcaaagactgccaatcaaaactacaagatccctgccaccgggtcagacagtctcatcaaatacgagacgcacagcactctggacggaagatggagtgccctgacccccggacctccaatggccacggctggacctgcggacagcaagttcagcaacagccagctcatctttgcggggcctaaacagaacggcaacacggccaccgtacccgggactctgatcttcacctctgaggaggagctggcagccaccaacgccaccgatacggacatgtggggcaacctacctggcggtgaccagagcaacagcaacctgccgaccgtggacagactgacagccttgggagccgtgcctggaatggtctggcaaaacagagacatttactaccagggtcccatttgggccaagattcctcataccgatggacactttcacccctcaccgctgattggtgggtttgggctgaaacacccgcctcctcaaatttttatcaagaacaccccggtacctgcgaatcctgcaacgaccttcagctctactccggtaaactccttcattactcagtacagcactggccaggtgtcggtgcagattgactgggagatccagaaggagcggtccaaacgctggaaccccgaggtccagtttacctccaactacggacagcaaaactctctgttgtgggctcccgatgcggctgggaaatacactgagcctagggctatcggtacccgctacctcacccaccacctgtaataacctgttaatcaataaaccggtttattcgtttcagttgaactttggtctccgtgtccttcttatcttatctcgtttccatggctactgcgtacataagcagcggcctgcggcgcttgcgcttcgcggtttacaactgccggttaatcagtaacttctggcaaaccatgatgatggagttggccactccctctatgcgcgctcgctcactcactcggccctggagaccaaaggtctccagactgccggcctctggccggcagggccgagtgagtgagcgagcgcgcatagagggagtggccaa

SEQ ID NO: 62 - DNA, 3098 bp, Adeno-associated virus
gaattcgccctttctacggctgcgtcaactggaccaatgagaactttcccttcaacgattgcgtcgacaagatggtgatctggtgggaggagggcaagatgacggccaaggtcgtggagtccgccaaggccattctcggcggcagcaaggtgcgcgtggaccaaaagtgcaagtcttccgcccagatcgatcccacccccgtgatcgtcacttccaacaccaacatgtgcgctgtgattgacgggaacagcaccaccttcgagcaccagcagccgttacaagaccggatgttcaaatttgaactcacccgccgtctggagcacgactttggcaaggtgacaaagcaggaagtcaaagagttcttccgctgggcgcaggatcacgtgaccgaggtggcgcatgagttctacgtcagaaagggtggagccaacaagagacccgcccccgatgacgcggataaaagcgagcccaagcgggcctgcccctcagtcgcggatccatcgacgtcagacgcggaaggagctccggtggactttgccgacaggtaccaaaacaaatgttctcgtcacgcgggcatgcttcagatgctgtttccctgcaagacatgcgagagaatgaatcagaatttcaacatttgcttcacgcacgggaccagagactgttcagaatgtttccccggcgtgtcagaatctcaaccggtcgtcagaaagaggacgtatcggaaactctgtgccattcatcatctgctggggcgggctcccgagattgcttgctcggcctgcgatctggtcaacgtggacctggatgaccgtgtttctgagcaataaatgacttaaaccaggtatggctgccgatggttatcttccagattggctcgaggacaacctctctgagggcattcgcgagtggtgggacttgaaacctggagccccgaaacccaaagccaaccagcaaaagcaggacgacggccggggtctggtgcttcctggctacaagtacctcggacccttcaacggactcgacaagggagagccggtcaacgaggcagacgccgcggccctcgagcacgacaaggcctacgacaagcagctcgagcagggggacaacccgtacctcaagtacaaccacgccgacgccgagtttcaggagcgtcttcaagaagatacgtcttttgggggcaacctcgggcgagcagtcttccaggccaagaagcgggttctcgaacctctcggtctggttgaggaaggcgctaagacggctcctggaaagaagagacccatagaatcccccgactcctccacgggcatcggcaagaaaggccagcagcccgctaaaaagaagctcaactttgggcagactggcgactcagagtcagtgcccgacccccaacctctcggagaacctcccgccgcgccctcaggtctgggatctggtacaatggctgcaggcggtggcgcaccaatggcagacaataacgaaggcgccgacggagtgggtaatgcctccggaaattggcattgcgattccacatggctgggcgacagagtcatcaccaccagcacccgcacctgggccctgcccacctacaacaaccacctctacaagcagatatcaagtcagagcggggctaccaacgacaaccacttcttcggctacagcaccccctggggctattttgacttcaacagattccactgccacttctcaccacgtgactggcagcgactcatcaacaacaactggggattccggcccagaaagctgcggttcaagttgttcaacatccaggtcaaggaggtcacgacgaacgacggcgttacgaccatcgctaataaccttaccagcacgattcaggtcttctcggactcggagtaccaactgccgtacgtcctcggctctgcgcaccagggctgcctccctccgttccctgcggacgtgttcatgattcctcagtacggatatctgactctaaacaacggcagtcagtctgtgggacgttcctccttctactgcctggagtactttccttctcagatgctgagaacgggcaataactttgaattcagctacacctttgaggaagtgcctttccacagcagctatgcgcacagccagagcctggaccggctgatgaatcccctcatcgaccagtacctgtactacctggcccggacccagagcactacggggtccacaagggagctgcagttccatcaggctgggcccaacaccatggccgagcaatcaaagaactggctgcccggaccctgttatcggcagcagagactgtcaaaaaacatagacagcaacaacaacagtaactttgcctggaccggggccactaaataccatctgaatggtagaaattcattaaccaacccgggcgtagccatggccaccaacaaggacgacgaggaccagttctttcccatcaacggagtgctggtttttggcgaaacgggggctgccaacaagacaacgctggaaaacgtgctaatgaccagcgaggaggagatcaaaaccaccaatcccgtggctacagaagaatacggtgtggtctccagcaacctgcaatcgtctacggccggaccccagacacagactgtcaacagccagggggctctgcccggcatggtctggcagaaccgggacgtgtacctgcagggtcccatctgggccaaaattcctcacacggacggcaactttcacccgtctcccctgatgggcggatttggactcaaacacccgcctcctcaaattctcatcaaaaacaccccggtacctgctaatcctccagaggtgtttactcctgccaagtttgcctcatttatcacgcagtacagcaccggccaggtcagcgtggagatcgagtgggaactgcagaaagaaaacagcaaacgctggaatccagagattcagtacacctcaaattatgccaagtctaataatgtggaatttgctgtcaacaacgaaggggtttatactgagcctcgccccattggcacccgttacctcacccgtaacctgtaattgcctgttaatcaataaaccggttaattcgtttcagttgaactttggtctctgcgaagggcgaattc

SEQ ID NO: 63 - protein, 728 aa, Artificial Sequence
  Description of Artificial Sequence: Synthetic polypeptide
MAADGYLPDWLEDNLSEGIREWWDLKPGAPKPKANQQKQDDGRGLVLPGYKYLGPFNGLDKGEPVNEADAAALEHDKAYDKQLEQGDNPYLKYNHADAEFQERLQEDTSFGGNLGRAVFQAKKRVLEPLGLVEEGAKTAPGKKRPIESPDSSTGIGKKGQQPAKKKLNFGQTGDSESVPDPQPLGEPPAAPSGLGSGTMAAGGGAPMADNNEGADGVGNASGNWHCDSTWLGDRVITTSTRTWALPTYNNHLYKQISSQSGATNDNHFFGYSTPWGYFDFNRFHCHFSPRDWQRLINNNWGFRPRKLRFKLFNIQVKEVTTNDGVTTIANNLTSTIQVFSDSEYQLPYVLGSAHQGCLPPFPADVFMIPQYGYLTLNNGSQSVGRSSFYCLEYFPSQMLRTGNNFEFSYTFEEVPFHSSYAHSQSLDRLMNPLIDQYLYYLARTQSTTGSTRELQFHQAGPNTMAEQSKNWLPGPCYRQQRLSKNIDSNNNSNFAWTGATKYHLNGRNSLTNPGVAMATNKDDEDQFFPINGVLVFGETGAANKTTLENVLMTSEEEIKTTNPVATEEYGVVSSNLQSSTAGPQTQTVNSQGALPGMVWQNRDVYLQGPIWAKIPHTDGNFHPSPLMGGFGLKHPPPQILIKNTPVPANPPEVFTPAKFASFITQYSTGQVSVEIEWELQKENSKRWNPEIQYTSNYAKSNNVEFAVNNEGVYTEPRPIGTRYLTRNL

SEQ ID NO: 64 - DNA, 2495 bp, Adeno-associated virus
gaattcgccctttctacggctgcgtcaactagaccaatgagaactttcccttcaacgattgcgtcgacaagatggtgatctggtgggaggagggcaagatgacggccaaggtcgtggagtccgccaaggccattcatcatctgctggggcgggctcccgagattgcttgctcggcctgcgatctggtcaacgtggacctggatgactgtgtttctgagcaataaatgacttaaaccaggtatggctgccgatggttatcttccagattggctcgaggacaacctctctgagggcattcgcgagtggtgggacttgaaacctggagccccgaaacccaaagccaaccagcaaaagcaggacgacggccggggtctggtgcttcctggctacaagtacctcggacccttcaacggactcgacaagggagagccggtcaacgaggcagacgccgcggccctcgagcacgacaaggcctacgacaagcagctcgagcagggggacaacccgtacctcaagtacaaccacgccgacgccgagtttcaggagcgtcttcaagaagatacgtcttttgggggcaacctcgggcgagcagtcttccaggccaagaagcgggttctcgaacctctcggtctggttgaggaaggcgctaagacggctcctggaaagaagagacccatagaatcccccgactcctccacgggcatcggcaagaaaggccagcagcccgctaaaaagaagctcaactttgggcagactggcgactcagagtcagtgcccgaccctcaaccaatcggagaaccccccgcaggcccctctggtctgggatctggtacaatggctgcaggcggtggcgctccaatggcagacaataacgaaggcgccgacggagtgggtaatgcctccggaaattggcattgcgattccacatggctgggcgacagagtcatcaccaccagcacccgcacctgggccctgcccacctacaacaaccacctctacaagcagatatcaagtcagagcggggctaccaacgacaaccacttcttcggctacagcaccccctggggctattttgacttcaacagattccactgccacttctcaccacgtgactggcagcgactcatcaacaacaactggggattccggcccagaaagctgcggttcaagttgttcaacatccaggtcaaggaggtcacgacgaacgacggcgttacgaccatcgctaataaccttaccagcacgattcaggtcttctcggactcggagtaccaactgccgtacgtcctcggctctgcgcaccagggctgcctccctccgttccctgcggacgtgttcatgattcctcagtacggatatctgactctaaacaacggcagtcagtctgtgggacgttcctccttctactgcctggagtactttccttctcagatgctgagaacgggcaataactttgaattcagctacacctttgaggaagtgcctttccacagcagctatgcgcacagccagagcctggaccggctgatgaatcccctcatcgaccagtacctgtactacctggcccggacccagagcactacggggtccacaagggagctgcagttccatcaggctgggcccaacaccatggccgagcaatcaaagaactggctgcccggaccctgttatcggcagcagagactgtcaaaaaacatagacagcaacaacaccagtaactttgcctggaccggggccactaaataccatctgaatggtagaaattcattaaccaacccgggcgtagccatggccaccaacaaggacgacgaggaccagttctttcccatcaacggagtgctggtttttggcaaaacgggggctgccaacaagacaacgctggaaaacgtgctaatgaccagcgaggaggagatcaaaaccaccaatcccgtggctacagaacagtacggtgtggtctccagcaacctgcaatcgtctacggccggaccccagacacagactgtcaacagccagggggctctgcccggcatggtctggcagaaccgggacgtgtacctgcagggtcccatctgggccaaaattcctcacacggacggcaactttcacccgtctcccctgatgggcggatttggactcaaacacccgcctcctcaaattctcatcaaaaacaccccggtacctgctaatcctccagaggtgtttactcctgccaagtttgcctcatttatcacgcagtacagcaccggccaggtcagcgtggagatcgagtgggaactgcagaaagaaaacagcaaacgctggaatccagagattcagtacacctcaaattatgccaagtctaataatgtggaatttgctgtcaacaacgaaggggtttatactgagcctcgccccattggcacccgttacctcacccgtaacctgtaattgcctgttaatcaataaaccggttaattcgtttcagttgaactttggtctctgcgaagggcgaattc

SEQ ID NO: 65 - protein, 728 aa, Artificial Sequence
  Description of Artificial Sequence: Synthetic polypeptide
MAADGYLPDWLEDNLSEGIREWWDLKPGAPKPKANQQKQDDGRGLVLPGYKYLGPFNGLDKGEPVNEADAAALEHDKAYDKQLEQGDNPYLKYNHADAEFQERLQEDTSFGGNLGRAVFQAKKRVLEPLGLVEEGAKTAPGKKRPIESPDSSTGIGKKGQQPAKKKLNFGQTGDSESVPDPQPIGEPPAGPSGLGSGTMAAGGGAPMADNNEGADGVGNASGNWHCDSTWLGDRVITTSTRTWALPTYNNHLYKQISSQSGATNDNHFFGYSTPWGYFDFNRFHCHFSPRDWQRLINNNWGFRPRKLRFKLFNIQVKEVTTNDGVTTIANNLTSTIQVFSDSEYQLPYVLGSAHQGCLPPFPADVFMIPQYGYLTLNNGSQSVGRSSFYCLEYFPSQMLRTGNNFEFSYTFEEVPFHSSYAHSQSLDRLMNPLIDQYLYYLARTQSTTGSTRELQFHQAGPNTMAEQSKNWLPGPCYRQQRLSKNIDSNNTSNFAWTGATKYHLNGRNSLTNPGVAMATNKDDEDQFFPINGVLVFGKTGAANKTTLENVLMTSEEEIKTTNPVATEQYGVVSSNLQSSTAGPQTQTVNSQGALPGMVWQNRDVYLQGPIWAKIPHTDGNFHPSPLMGGFGLKHPPPQILIKNTPVPANPPEVFTPAKFASFITQYSTGQVSVEIEWELQKENSKRWNPEIQYTSNYAKSNNVEFAVNNEGVYTEPRPIGTRYLTRNL

SEQ ID NO: 66 - DNA, 2504 bp, Adeno-associated virus
gaattcgccctttctacggctgcgtcaactggaccaatgagaactttcccttcaacgattgcgtcgacaagatggtgatctggtgggaggagggcaagatgacggccaaggtcgtggagtccgccaaggccattcatcatctgctggggcgggctcccgagattgcttgctcggcctgcgatctggtcaacgtggacctggatgactgtgtttctgagcaataaatgacttaaaccaggtatggctgccgatggttatcttccagattggctcgaggacaacctctctgagggcattcgcgagtggtgggacttgaaacctggagccccgaaacccaaagccaaccagcaaaagcaggacgacggccggggtctggtgcttcctggctacaagtacctcggacccttcaacggactcgacaagggagagccggtcaacgaggcagacgccgcggccctcgagcacgacaaggcctacgacaagcagctcgagcagggggacaacccgtacctcaagtacaaccacgccgacgccgagtttcaggagcgtcttcaagaagatacgtcttttgggggcaacctcgggcgagcagtcttccaggccaagaagcgggttctcgaacctctcggtctggttgaggaaggcgctaagacggctcctggaaagaagagacccatagaatcccccgactcctccacgggcatcggcaagaaaggccagcagcccgctaaaaagaagctcaactttgggcagactggcgactcagagtcagtgcccgaccctcaaccaatcggagaaccccccgcaggcccctctggtctgggatctggtacaatggctgcaggcggtggcgctccaatggcagacaataacgaaggcgccgacggagtgggtaatgcctccggaaattggcattgcgattccacatggctgggcgacagagtcatcaccaccagcacccgcacctgggccctgcccacctacaacaaccacctctacaagcagatatcaagtcagagcggggctaccaacgacaaccacttcttcggctacagcaccccctggggctattttgacttcaacagattccactgccacttctcatcacgtgactggcagcgactcatcaacaacaactggggattccggcccaagagactcaacttcaagctcttcaacatccaggtcaaggaggtcacgcagaatgaaggcaccaagaccatcgccaataaccttaccagcacgattcaggtctttacggactcggaataccggctcccgtacgtcctcggctctgcgcaccagggctgcctgcctccgttcccggcggacgtcttcatgattcctcagtacgggtacctgactctgaacaacggcagtcaggccgtgggccgttcctccttctactgcctggagtactttccttctcaaatgctgagaacgggcaacaactttgagttcagctaccagtttgaggacgtgccttttcacagcagctacgcgcacagccaaagcctggaccggctgatgaaccccctcatcgaccagtacctgtactacctgtctcggactcagtccacgggaggtaccgcaggaactcagcagttgctattttctcaggccgggcctaataacatgtcggctcaggccaaaaactggctacccgggccctgctaccggcagcaacgcgtctccacgacactgtcgcaaaataacaacagcaactttgcttggaccggtgccaccaagtatcatctgaatggcagagactctctggtaaatcccggtgtcgctatggcaacgcacaaggacgacgaagagcgattttttccatccagcggagtcttgatgtttgggaaacagggagctggaaaagacaacgtggactatagcagcgttatgctaaccagtgaggaagaaatcaaaaccaccaacccagtggccacagaacagtacggcgtggtggccgataacctgcaacagcaaaacgccgctcctattgtaggggccgtcaacagtcaaggagccttacctggcatggtctggcagaaccgggacgtgtacctgcagggtcctatctgggccaagattcctcacacggacggcaactttcatccttcgccgctgatgggaggctttggactgaaacacccgcctcctcagatcctgattaagaatacacctgttcccgcggatcctccaactaccttcagtcaagccaagccggcgtcgttcatcacgcagtacagcaccggacaggtcagcgtggaaattgaatgggagctgcagaaagagaacagcaagcgctggaacccagagattcagtatacttccaactactacaaatctacaaatgtggactttgctgtcaatactgagggtacttattcagagcctcgccccattggcacccgttacctcacccgtaacctgtaattgcctgttaatcaataaaccggttaattcgtttcagttgaactttggtctctgcgaagggcgaattc

SEQ ID NO: 67 - protein, 731 aa, Artificial Sequence
  Description of Artificial Sequence: Synthetic polypeptide
MAADGYLPDWLEDNLSEGIREWWDLKPGAPKPKANQQKQDDGRGLVLPGYKYLGPFNGLDKGEPVNEADAAALEHDKAYDKQLEQGDNPYLKYNHADAEFQERLQEDTSFGGNLGRAVFQAKKRVLEPLGLVEEGAKTAPGKKRPIESPDSSTGIGKKGQQPAKKKLNFGQTGDSESVPDPQPIGEPPAGPSGLGSGTMAAGGGAPMADNNEGADGVGNASGNWHCDSTWLGDRVITTSTRTWALPTYNNHLYKQISSQSGATNDNHFFGYSTPWGYFDFNRFHCHFSSRDWQRLINNNWGFRPKRLNFKLFNIQVKEVTQNEGTKTIANNLTSTIQVFTDSEYRLPYVLGSAHQGCLPPFPADVFMIPQYGYLTLNNGSQAVGRSSFYCLEYFPSQMLRTGNNFEFSYQFEDVPFHSSYAHSQSLDRLMNPLIDQYLYYLSRTQSTGGTAGTQQLLFSQAGPNNMSAQAKNWLPGPCYRQQRVSTTLSQNNNSNFAWTGATKYHLNGRDSLVNPGVAMATHKDDEERFFPSSGVLMFGKQGAGKDNVDYSSVMLTSEEEIKTTNPVATEQYGVVADNLQQQNAAPIVGAVNSQGALPGMVWQNRDVYLQGPIWAKIPHTDGNFHPSPLMGGFGLKHPPPQILIKNTPVPADPPTTFSQAKPASFITQYSTGQVSVEIEWELQKENSKRWNPEIQYTSNYYKSTNVDFAVNTEGTYSEPRPIGTRYLTRNL

SEQ ID NO: 68 - DNA, 3128 bp, Adeno-associated virus
gaattcgccctttctacggctgcgtcaactggaccaatgagaactttcccttcaacgattgcgtcgacaagatggtgatctggtgggaggagggcaagatgacggccaaggtcgtggagtccgccaaggccattctcggcggcagcaaggtgcgcgtggaccaaaagtgcaagtcttccgcccagatcgatcccacccccgtgatcgtcacttccaacaccaacatgtgcgccgtgattgacgggaacagcaccaccttcgagcaccagcagccgttacaagaccggatgttcaaatttgaactcacccgccgtctggagcacgactttggcaaggtgacaaagcaggaagtcaaagagttcttccgctgggcgcaggatcacgtgaccgaggtggcgcatgagttctacgtcagaaagggtggagccaacaagagacccgcccccgatgacgcggataaaagcgagcccaagcgggcctgcccctcagtcgcggatccatcgacgtcagacgcggaaggagctccggtggactttgccgacaggtaccaaaacaaatgttctcgtcacgcgggcatgcttcagatgctgtttccctgcaagacatgcgagagaatgaatcagaatttcaacatttgcttcacgcacgggaccagagactgttcagaatgtttccccggcgtgtcagaatctcaaccggtcgtcagaaagaggacgtatcggaaactctgtgccattcatcatctgctagggcgggctcccgagattgcttgctcggcctgcgatctggtcaacgtggacctggatgactgtgtttctgagcaataaatgacttaaaccaggtatggctgccgatggttatcttccagattggctcgaggacaacctctctgagggcattcgcgagtggtgggacttgaaacctggagccccgaaacccaaagccaaccagcaaaagcaggacgacggccggggtctggtgcttcctggctacaagtacctcggacccttcaacggactcgacaagggggagcccgtcaacgcggcggacgcagcggccctcgagcacgacaaggcctacgaccagcagctcaaagcgggtgacaatccgtacctgcggtataaccacgccgacgccgagtttcaggagcgtctgcaagaagatacgtcttttgggggcaacctcgggcgagcagtcttccaggccaagaagcgggttctcgaacctctcggtctggttgaggaaggcgctaagacggctcctggaaagaagagaccggtagagccatcaccccagcgttctccagactcctctacgggcatcggcaagacaggccagcagcccgcgaaaaagagactcaactttgggcagactggcgactcagagtcagtgcccgaccctcaaccaatcggagaaccccccgcaggcccctctggtctgggatctggtacaatggctgcaggcggtggcgctccaatggcagacaataacgaaggcgccgacggagtgggtagttcctcaggaaattggcattgcgattccacatggctgggcgacagagtcatcaccaccagcacccgaacctgggccctccccacctacaacaaccacctctacaagcaaatctccaacgggacatcgggaggaagcaccaacgacaacacctacttcggctacagcaccccctgggggtattttgactttaacagattccactgccacttctcaccacgtgactggcagcgactcatcaacaacaactggggattccggcccaagagactcaacttcaagctcttcaacatccaggtcaaggaggtcacgcagaatgaaggcaccaagaccatcgccaataaccttaccagcacgattcaggtctttacggactcggaataccagctcccgtacgtcctcggctctgcgcaccagggctgcctgcctccgttcccggcggacgtcttcatgattcctcagtacgggtacctgactctgaacaacggcagtcaggccgtgggccgttcctccttctactgcctggagtactttccttctcaaatgctgagaacgggcaacaactttgagttcagctaccagtttgaggacgtgccttttcacagcagctacgcgcacagccaaagcctggaccggctgatgaaccccctcatcgaccagtacctgtactacctgtctcggactcagtccacgggaggtaccgcaggaactcagcagttgctattttctcaggccgggcctaataacatgtcggctcaggccaaaaactggctacccgggccctgctaccggcagcaacgcgtctccacgacactgtcgcaaaataacaacagcaactttgcttggaccggtgccaccaagtatcatctgaatggcagagactctctggtaaatcccggtgtcgctatggcaacgcacaaggacgacgaagagcgattttttccatccagcggagtcttgatgtttgggaaacagggagctggaaaagacaacgtggactatagcagcgttatgctaaccagtgaggaagaaatcaaaaccaccaacccagtggccacagaacagtacggcgtggtggccgataacctgcaacagcaaaacgccgctcctattgtaggggccgtcaacagtcaaggagccttacctggcatggtctggcagaaccgggacgtgtacctgcagggtcctatctgggccaagattcctcacacggacggcaactttcatccttcgccgctgatgggaggctttggactgaaacacccgcctcctcagatcctgattaagaatacacctgttcccgcggatcctccaactaccttcagtcaagccaagctggcgtcgttcatcacgcagtacagcaccggacaggtcagcgtggaaattgaatgggagctgcagaaagagaacagcaagcgctggaacccagagattcagtatacttccaactactacaaatctacaaatgtggactttgctgtcaatactgagggtacttattcagagcctcgccccattggcacccgttacctcacccgtaacctgtaattgcctgttaatcaataaaccggctaattcgtttcagttgaactttggtctctgcgaagggcgaattc

SEQ ID NO: 69 - protein, 738 aa, Artificial Sequence
  Description of Artificial Sequence: Synthetic polypeptide
MAADGYLPDWLEDNLSEGIREWWDLKPGAPKPKANQQKQDDGRGLVLPGYKYLGPFNGLDKGEPVNAADAAALEHDKAYDQQLKAGDNPYLRYNHADAEFQERLQEDTSFGGNLGRAVFQAKKRVLEPLGLVEEGAKTAPGKKRPVEPSPQRSPDSSTGIGKTGQQPAKKRLNFGQTGDSESVPDPQPIGEPPAGPSGLGSGTMAAGGGAPMADNNEGADGVGSSSGNWHCDSTWLGDRVITTSTRTWALPTYNNHLYKQISNGTSGGSTNDNTYFGYSTPWGYFDFNRFHCHFSPRDWQRLINNNWGFRPKRLNFKLFNIQVKEVTQNEGTKTIANNLTSTIQVFTDSEYQLPYVLGSAHQGCLPPFPADVFMIPQYGYLTLNNGSQAVGRSSFYCLEYFPSQMLRTGNNFEFSYQFEDVPFHSSYAHSQSLDRLMNPLIDQYLYYLSRTQSTGGTAGTQQLLFSQAGPNNMSAQAKNWLPGPCYRQQRVSTTLSQNNNSNFAWTGATKYHLNGRDSLVNPGVAMATHKDDEERFFPSSGVLMFGKQGAGKDNVDYSSVMLTSEEEIKTTNPVATEQYGVVADNLQQQNAAPIVGAVNSQGALPGMVWQNRDVYLQGPIWAKIPHTDGNFHPSPLMGGFGLKHPPPQILIKNTPVPADPPTTFSQAKLASFITQYSTGQVSVEIEWELQKENSKRWNPEIQYTSNYYKSTNVDFAVNTEGTYSEPRPIGTRYLTRNL

SEQ ID NO: 70 - DNA, 3084 bp, Adeno-associated virus
gaattcgccctttctacggctgcatcaactggaccaatgagaactttcccttcaacgattgcgtcgacaagatggtgatctggtgggaggagggcaagatgacggccaaggtcgtggagtccgccaaggccattctcggcggcagcaaggtgcgcgtggaccaaaagtgcaagtcgtccgcccagatcgaccccacccccgtgatcgtcacctccaacaccaacatgtgcgccgtgattgacgggaacagcaccaccttcgagcaccagcagccgttgcaggaccggatgttcaagttcgaactcacccgccgtctggagcacgactttggcaaggtgaccaagcaggaagtcaaagagttcttccgctgggcgcaggatcacgtgaccgaggtggcgcatgagttctacgtcagaaagggcggagccagcaaaagacccgcccccgatgacgcggatataagcgagcccaagcgggcctgcccctcagtcgcggatccatcgacgtcagacgcggaaggagctccggtggactttgccgacaggtaccaaaacaaatgttctcgtcacgcgggcatgcttcagatgctgtttccctgcaaaacgtgcgagaaaatgaatcagaatttcaacatttgcttcacgcacggggtcagagactgctcagaatgtttccccggtgcatcagaatctcaaccggtcgtcagaaaaaaaacgtatcagaaactgtgtgccattcatcatctgctggggcgggcacccgagattgcttgctcggcctgcgatctggtcaacgtggacctggacgactgtgtttctgagcaataaatgacttaaaccaggtatggctgccgatggttatcttccagattggcttgaggacaacctctctgagggcattcgcgagtggtgggacctgaaacctggagccccgaaacccaaagccaaccagcaaaagcaggacgacggccggggtctggtgcttcctggctacaagtacctcggacccttcaacggactcgacaagggggagcccgtcaacgcggcggacgcagcggccctcgagcacgacaaggcctacgaccagcagctcaaagcgggtgacaatccgtacctgcggtataaccacgccgacgccgagtttcaggagcgtctgcaagaagatacgtcttttgggggcaacctcgggcgagcagtcttccaggccaagaagcgggttctcgaacctctcggtctggttgaggaaggcgctaagacggctcctggaaagaagagaccggtagagccatcacctcagcgttcccccgactcctccacgggcatcggcaagaaaggccaccagcccgcgagaaagagactgaactttgggcagactggcgactcggagtcagtccccgaccctcaaccaatcggagaaccaccagcaggcccctctggtctgggatctggtacaatggctgcaggcggtggcgctccaatggcagacaataacgaaggcgccgacggagtgggtagttcctcaggaaattggcattgcgattccacatggctgggcgacagagtcatcaccaccagcacccgaacctgggccctgcccacctacaacaaccatctctacaagcaaatctccaacgggacatcgggaggaagcactaacgacaacacctactttggctacagcaccccctgggggtattttgacttcaacagattccactgccacttctcaccacgtgactggcagcgactcatcaacaataactggggattccggcccaagagactcaacttcaagctcttcaacatccaggtcaaggaggtcacgcagaatgaaggcaccaagaccatcgccaataaccttaccagcacgattcaggtgtttacggactcggaataccagctcccgtacgtccccggctctgcgcaccagggctgcctccctccgttcccggcggacgtcttcatgattcctcagtacgggtatctgaccctaaacaatggcagtcaggctgtgggccgttcctccttctactgcctggaatacttcccttctcaaatgctgaggacgggcaacaactttgaattcagctacaccttcgaggacgtgcctttccacagcagctacgcgcacagccagagcctggaccggctgatgaaccctctcatcgaccagtacctgtattacttatccagaactcagtccacaggaggaactcaaggtactcagcaattgttattttctcaagccgggcccgcaaacatgtcggctcaggccaagaactggctacctggaccgtgttaccgtcagcaacgagtttccacgacactgtcgcaaaacaacaacagcaattttgcttggaccggtgccaccaagtatcacctgaatggcagagactccctggttaatcccggcgttgccatggctacccacaaggacgacgaggagcgcttcttcccgtcaagcggagttctaatgtttggcaagcagggggctggaaaagacaatgtggactacagcagcgtgatgctcaccagcgaagaagaaattaaaactactaacccagtggctacagagcagtatggtgtggtggcagacaacctgcagcagaccaacggagctcccattgtgggaactgtcaacagccagggggccttacctggtatggtctggcaaaaccgggacgtgtacctgcagggccccatctgggccaaaattcctcacacggacggcaactttcatccttcgccgctgatgggaggctttggactgaaacacccgcctcctcagatcctggtgaaaaacactcctgttcctgcggatcctccgaccaccttcagccaggccaagctggcttcttttatcacgcagtacagcaccggacaggtcagcgtggaaatcgaatgggagctgcagaaagaaaacagcaagcgctggaacccagagattcagtatacttccaactactacaaatctacaaatgtggactttgctgtcaatactgagggtacttattcagagcctcgccccattggcactcgttatctcacccgtaatctgtaattgcttgttaatcaataaaccggt

SEQ ID NO: 71 - protein, 738 aa, Artificial Sequence
  Description of Artificial Sequence: Synthetic polypeptide
MAADGYLPDWLEDNLSEGIREWWDLKPGAPKPKANQQKQDDGRGLVLPGYKYLGPFNGLDKGEPVNAADAAALEHDKAYDQQLKAGDNPYLRYNHADAEFQERLQEDTSFGGNLGRAVFQAKKRVLEPLGLVEEGAKTAPGKKRPVEPSPQRSPDSSTGIGKKGHQPARKRLNFGQTGDSESVPDPQPIGEPPAGPSGLGSGTMAAGGGAPMADNNEGADGVGSSSGNWHCDSTWLGDRVITTSTRTWALPTYNNHLYKQISNGTSGGSTNDNTYFGYSTPWGYFDFNRFHCHFSPRDWQRLINNNWGFRPKRLNFKLFNIQVKEVTQNEGTKTIANNLTSTIQVFTDSEYQLPYVPGSAHQGCLPPFPADVFMIPQYGYLTLNNGSQAVGRSSFYCLEYFPSQMLRTGNNFEFSYTFEDVPFHSSYAHSQSLDRLMNPLIDQYLYYLSRTQSTGGTQGTQQLLFSQAGPANMSAQAKNWLPGPCYRQQRVSTTLSQNNNSNFAWTGATKYHLNGRDSLVNPGVAMATHKDDEERFFPSSGVLMFGKQGAGKDNVDYSSVMLTSEEEIKTTNPVATEQYGVVADNLQQTNGAPIVGTVNSQGALPGMVWQNRDVYLQGPIWAKIPHTDGNFHPSPLMGGFGLKHPPPQILVKNTPVPADPPTTFSQAKLASFITQYSTGQVSVEIEWELQKENSKRWNPEIQYTSNYYKSTNVDFAVNTEGTYSEPRPIGTRYLTRNL

SEQ ID NO: 72 - DNA, 3123 bp, Adeno-associated virus
gaattcgcccttggctgcgtcaactggaccaatgagaactttcccttcaacgattgcgtcgacaagatggtgatctggtgggaggagggcaagatgacggccaaggtcgtggagtccgccaaggccattctcggcggcagcaaggtgcgcgtggaccaaaagtgcaagtcgtccgcccagatcgaccccacccccgtgatcgtcacctccaacaccaacatgtgcgccgtgattgacgggaacagcaccaccttcgagcaccagcagccgttgcaggaccggatgttcaagttcgaactcacccgccgtctggagcacgactttggcaaggtgaccaagcaggaagtcaaagagttcttccgctgggcgcaggatcacgtgaccgaggtggcgcatgagttctacgtcagaaagggcggagccagcaaaagacccgcccccgatgacgcggatataagcgagcccaagcgggcctgcccctcagtcgcggatccatcgacgtcagacgcggaaggagctccggtggactttgccgacaggtaccaaaacaaatgttctcgtcacgcgggcatgctccagatgctgtttccctgcaaaacgtgcgagagaatgaatcagaatttcaacatttgcttcacgcacggggtcagagactgctcagaatgtttccccggtgcatcagaatctcaaccggtcgtcagaaaaaaaacgtatcagaaactgtgtgccattcatcatctgctggggcgggcacccgagattgcttgctcggcctgcgatctggtcaacgtggacctggacgactgtgtttctgagcaataaatgacttaaaccaggtatggctgccgatggttatcttccagattggcttgaggacaacctctctgagggcattcgcgagtggtgggacctgaaacctggagccccgaaacccaaagccaaccagcaaaagcaggacgacggccggggtctggtgcttcctggctacaagtacctcggacccttcaacggactcgacaagggggagcccgtcaacgcggcggacgcagcggccctcgagcacgacaaggcctacgaccagcagctcaaagcgggtgacaatccgtacctgcggtataaccacgccgacgccgagtttcaggagcgtctgcaagaagatacgtcttttgggggcaacctcgggcgagcagtcttccaggccaagaagcgggttctcgaacctctcggtctggttgaggaaggcgctaagacggctcctggaaagaagagaccggtagagccatcacctcagcgttcccccgactcctccacgggcatcggcaagaaaggccaccagcccgcgagaaagagactgaactttgggcagactggcgactcggagtcagtccccgaccctcaaccaatcggagaaccaccagcaggcccctctggtctgggatctggtacaatggctgcaggcggtggcgctccaatggcagacaataacgaaggcgccgacggagtgggtagttcctcaggaaattggcattgcgattccacatggctgggcgacagagtcatcaccaccagcacccgaacctgggccctgcccacctacaacaaccatctctacaagcaaatctccaacgggacatcgggaggaagcactaacgacaacacctactttggctacagcaccccctgggggtattttgacttcaacagattccactgccacttctcaccacgtgactggcagcgactcatcaacaataactggggattccggcccaagagactcaacttcaagctcttcaacatccaggtcaaggaggtcacgcagaatgaaggcaccaagaccatcgccaataaccttaccagcacgattcaggtgtttacggactcggaataccagctcccgtacgtcctcggctctgcgcaccagggctgcctccctccgttcccggcggacgtcttcatgattcctcagtacgggtatctgaccctaaacaatggcagtcaggctgtgggccgttcctccttctactgcctggaatacttcccttctcaaatgctgaggacgggcaacaactttgaattcagctacaccttcgaggacgtgcctttccacagcagctacgcgcacagccagagcctggaccggctgatgaaccctctcatcgaccagtacctgtattacttatccagaactcagtccacaggaggaactcaaggtactcagcaattgttattttctcaagccgggcccgcaaacatgtcggctcaggccaagaactggctacctggaccgtgttaccgtcagcaacgagtttccacgacactgtcgcaaaacaacaacagcaattttgcttggaccggtgccaccaagtatcacctgaatggcagagactccctggttaatcccggcgttgccatggctacccacaaggacgacgaggagcgcttcttcccgtcaagcggagttctaatgtttggcaagcagggggctggaaaagacaatgtggactacagcagcgtgatgctcaccagcgaagaagaaattaaaactactaacccagtggctacagagcagtatggtgtggtggcagacaacctgcagcagaccaacggagctcccattgtgggaactgtcaacagccagggggccttacctggtatggtctggcaaaaccgggacgtgtacctgcagggccccatctgggccaaaattcctcacacggacggcaactttcatccttcgccgctgatgggaggctttggactgaaacacccgcctcctcagatcctggtgaaaaacactcctgttcctgcggatcctccgaccaccttcagccaggccaagctggcttcttttatcacgcagtacagcaccggacaggtcagcgtggaaatcgaatgggagctgcagaaagaaaacagcaagcgctggaacccagagattcagtatacttccaactactacaaatctacaaatgtggactttgctgtcaatactgagggtacttattcagagcctcgccccattggcactcgttatctcacccgtaatctgtaattgcttgttaatcaataaaccggttaattcgtttcagttgaactttggtctctgcgaagggcgaattc

SEQ ID NO: 73 - protein, 738 aa, Artificial Sequence
  Description of Artificial Sequence: Synthetic polypeptide
MAADGYLPDWLEDNLSEGIREWWDLKPGAPKPKANQQKQDDGRGLVLPGYKYLGPFNGLDKGEPVNAADAAALEHDKAYDQQLKAGDNPYLRYNHADAEFQERLQEDTSFGGNLGRAVFQAKKRVLEPLGLVEEGAKTAPGKKRPVEPSPQRSPDSSTGIGKKGHQPARKRLNFGQTGDSESVPDPQPIGEPPAGPSGLGSGTMAAGGGAPMADNNEGADGVGSSSGNWHCDSTWLGDRVITTSTRTWALPTYNNHLYKQISNGTSGGSTNDNTYFGYSTPWGYFDFNRFHCHFSPRDWQRLINNNWGFRPKRLNFKLFNIQVKEVTQNEGTKTIANNLTSTIQVFTDSEYQLPYVLGSAHQGCLPPFPADVFMIPQYGYLTLNNGSQAVGRSSFYCLEYFPSQMLRTGNNFEFSYTFEDVPFHSSYAHSQSLDRLMNPLIDQYLYYLSRTQSTGGTQGTQQLLFSQAGPANMSAQAKNWLPGPCYRQQRVSTTLSQNNNSNFAWTGATKYHLNGRDSLVNPGVAMATHKDDEERFFPSSGVLMFGKQGAGKDNVDYSSVMLTSEEEIKTTNPVATEQYGVVADNLQQTNGAPIVGTVNSQGALPGMVWQNRDVYLQGPIWAKIPHTDGNFHPSPLMGGFGLKHPPPQILVKNTPVPADPPTTFSQAKLASFITQYSTGQVSVEIEWELQKENSKRWNPEIQYTSNYYKSTNVDFAVNTEGTYSEPRPIGTRYLTRNL

SEQ ID NO: 74 - DNA, 3122 bp, Adeno-associated virus
gaattcgccctttctacggctgcgtcaactggaccaatgagaactttcccttcaacgattgcgtcgacaagatggtgatctggtgggaggagggcaagatgacggccaaggtcgtggagtccgccaaggccattctcggcggcagcaaggtgcgtgtggaccaaaagtgcaagtcttccgcccagatcgatcccacccccgtgatcgtcacctccaacaccaacatgtgcgccgtgattgacgggaacagcgccaccttcgagcaccagcagccgttgcaggaccggatgttcaaatttgaactcacccgccgtctggagcatgactttggcaaggtgacgaagcaggaagtcaaagagttcttccgctgggcgcaggatcacgtgaccgaggtggcgcatgagttccacgtcagaaagggtggagccaacaagagacccgcccccgatgacgcggatataagcgagcccaagcgggcctgcccctcagtcgcggatccatcgacgtcagacgcggaaggagctccggtggactttgccgacaggtaccaaaacaaatgttctcgtcacgcgggcatgcttcagatgctgtttccctgcaagacatgcgagagaatgaatcagaatttcaacatttgcttcacgcacgggaccagagactgttcagaatgtttccccggcgtgtcagaatctcaaccggtcgtcagaaagaggacgtatcggaaactctgtgcgattcatcatctgctggggcgggctcccgagattgcttgctcggcctgcgatctggtcaacgtggacctggatgactgtgtttctgagcaataaatgacttaaaccaggtatggctgccgatggttatcttccagattggctcgaggacaacctctctgagggcattcgcgagtggtgggacttgaaacctggagccccgaaacccaaagccaaccagcaaaagcaggacgacggccggggtctggtgcttcctggctacaagtacctcggacccttcaacggactcgacaagggggagcccgtcaacgcggcggacgcagcggccctcgagcacgacaaagcctacgaccagcagctcaaagcgggtgacaatccgtacctgcggtataatcacgccgacgccgagtttcaggagcgtctgcaagaagatacgtcttttgggggcaacctcgggcgagcagtcttccaggccaagaagcgggttctcgaacctctcggtctggttgaggaaggcgctaagacggctcctggaaagaagagactggtagagcagtcgccacaagagccagactcctcctcgggcatcggcaagacaggccagcagcccgctaaaaagagactcaattttggtcagactggcgactcagagtcagtccccgacccacaacctctcggagaacctccagcagccccctcaggtctgggacctaatacaatggcttcaggcggtggcgctccaatggcagacaataacgaaggcgccgacggagtgggtaattcctcgggaaattggcattgcgattccacatggctgggggacagagtcatcaccaccagcacccgaacctgggccctgcccacctacaacaaccacctctacaagcaaatctccaacggcacctcgggaggaagcaccaacgacaacacctattttggctacagcaccccctgggggtattttgacttcaacagattccactgtcacttttcaccacgtgactggcaacgactcatcaacaacaattggggattccggcccaaaagactcaacttcaagctgttcaacatccaggtcaaggaagtcacgacgaacgaaggcaccaagaccatcgccaataatctcaccagcaccgtgcaggtctttacggactcggagtaccagttaccgtacgtgctaggatccgctcaccagggatgtctgcctccgttcccggcggacgtcttcacggttcctcagtacggctatttaactttaaacaatggaagccaagccctgggacgttcctccttctactgtctggagtatttcccatcgcagatgctgagaaccggcaacaactttcagttcagctacaccttcgaggacgtgcctttccacagcagctacgcgcacagccagagcctggacaggctgatgaatcccctcatcgaccagtacctgtactacctggtcagaacgcaaacgactggaactggagggacgcagactctggcattcagccaagcgggtcctagctcaatggccaaccaggctagaaattgggtgcccggaccttgctaccggcagcagcgcgtctccacgacaaccaaccagaacaacaacagcaactttgcctggacgggagctgccaagtttaagctgaacggccgagactctctaatgaatccgggcgtggcaatggcttcccacaaggatgacgacgaccgcttcttcccttcgagcggggtcctgatttttggcaagcaaggagccgggaacgatggagtggattacagccaagtgctgattacagatgaggaagaaatcaaggctaccaaccccgtggccacagaagaatatggagcagtggccatcaacaaccaggccgccaatacgcaggcgcagaccggactcgtgcacaaccagggggtgattcccggcatggtgtggcagaatagagacgtgtacctgcagggtcccatctgggccaaaattcctcacacggacggcaactttcacccgtctcccctgatgggcggctttggactgaagcacccgcctcctcaaattctcatcaagaacacaccggttccagcggacccgccgcttaccttcaaccaggccaagctgaactctttcatcacgcagtacagcaccggacaggtcagcgtggaaatcgagtgggagctgcagaaagaaaacagcaaacgctggaatccagagattcaatacacttccaactactacaaatctacaaatgtggactttgctgtcaacacggaaggagtttatagcgagcctcgccccattggcacccgttacctcacccgcaacctgtaattacatgttaatcaataaaccggttaattcgtttcagttgaactttggtctctgcgaagggcgaattc

SEQ ID NO: 75 - protein, 736 aa, Artificial Sequence
  Description of Artificial Sequence: Synthetic polypeptide
MAADGYLPDWLEDNLSEGIREWWDLKPGAPKPKANQQKQDDGRGLVLPGYKYLGPFNGLDKGEPVNAADAAALEHDKAYDQQLKAGDNPYLRYNHADAEFQERLQEDTSFGGNLGRAVFQAKKRVLEPLGLVEEGAKTAPGKKRLVEQSPQEPDSSSGIGKTGQQPAKKRLNFGQTGDSESVPDPQPLGEPPAAPSGLGPNTMASGGGAPMADNNEGADGVGNSSGNWHCDSTWLGDRVITTSTRTWALPTYNNHLYKQISNGTSGGSTNDNTYFGYSTPWGYFDFNRFHCHFSPRDWQRLINNNWGFRPKRLNFKLFNIQVKEVTTNEGTKTIANNLTSTVQVFTDSEYQLPYVLGSAHQGCLPPFPADVFTVPQYGYLTLNNGSQALGRSSFYCLEYFPSQMLRTGNNFQFSYTFEDVPFHSSYAHSQSLDRLMNPLIDQYLYYLVRTQTTGTGGTQTLAFSQAGPSSMANQARNWVPGPCYRQQRVSTTTNQNNNSNFAWTGAAKFKLNGRDSLMNPGVAMASHKDDDDRFFPSSGVLIFGKQGAGNDGVDYSQVLITDEEEIKATNPVATEEYGAVAINNQAANTQAQTGLVHNQGVIPGMVWQNRDVYLQGPIWAKIPHTDGNFHPSPLMGGFGLKHPPPQILIKNTPVPADPPLTFNQAKLNSFITQYSTGQVSVEIEWELQKENSKRWNPEIQYTSNYYKSTNVDFAVNTEGVYSEPRPIGTRYLTRNL

SEQ ID NO: 76 - DNA, 3117 bp, Adeno-associated virus
gaattcgcccttggctgcgtcaactggaccaatgagaactttcccttcaacgattgcgtcgacaagatggtgatctggtgggaggagggcaagatgacggccaaggtcgtggagtccgccaaggccattctcggcggcagcaaggtgcgtgtggaccaaaagtgcaagtcttccgcccagatcgatcccacccccgtgatcgtcacctccaacaccaacatgtgcgccgtgattgacgggaacagcaccaccttcgagcaccagcagccgttgcaggaccggatgttcaaatttgaactcacccgccgtctggagcatgactttggcaaggtgacgaagcaggaagtcaaagagttcttccgctgggcgcaggatcacgtgaccgaggtggcgcatgagttccacgtcagaaagggtggagccaacaagagacccgcccccgatgacgcggatataagcgagcccaagcgggcctgcccctcagtcgcggatccatcgacgtcagacgcggaaggagctccggtggactttgccgacaggtaccaaaacaaatgttctcgtcacgcgggcatgcttcagatgctgtttccctgcaagacatgcgagagaatgaatcagaatttcaacatttgcttcacgcacgggaccagagactgttcagaatgtttccccggcgtgtcagaatctcaaccggtcgtcagaaagaggacgtatcggaaactctgtgcgattcatcatctgctggggcgggctcccgagattgcttgctcggcctgcgatctggtcaacgtggacctggatgactgtgtttctgagcaataaatgacttaaaccaggtatggctgccgatggttatcttccagattggctcgaggacaacctctctgagggcattcgcgagtggtgggacttgaaacctggagccccgaaacccaaagccaaccagcaaaagcaggacgacggccggggtctggtgcttcctggctacaagtacctcggacccttcaacggactcgacaagggggagcccgtcaacgcggcggacgcagcggccctcgagcacgacaaagcctacgaccagcagctcaaagcgggtgacaatccgtacctgcggtataatcacgccgacgccgagtttcaggagcgtctgcaagaagatacgtcttttgggggcaacctcgggcgagcagtcttccaggccaagaagcgggttctcgaacctctcggtctggttgaggaaggcgctaagacggctcctggaaagaagagaccggtagagcagtcgccacaagagccagactcctcctcgggcatcggcaagacaggccagcagcccgctaaaaagagactcaattttggtcagactggcgactcagagtcagtccccgacccacaacctctcggagaacctccagcagccccctcaggtctgggacctaatacaatggcttcaggcggtggcgctccaatggcagacaataacgaaggcgccgacggagtgggtaattcctcgggaaattggcattgcgattccacatggctgggggacagagtcatcaccaccagcacccgaacctgggccctgcccacctacaacaaccacctctacaagcaaatctccaacggcacctcgggaggaagcaccaacgacaacacctattttggctacagcaccccctgggggtattttgacttcaacagattccactgtcacttttcaccacgtgactggcaacgactcatcaacaacaattggggattccggcccaaaagactcaacttcaagctgttcaacatccaggtcaaggaagtcacgacgaacgaaggcaccaagaccatcgccaataatctcaccagcaccgtgcgggtctttacggactcggagtaccagttaccgtacgtgctaggatccgctcaccagggatgtctgcctccgttcccggcggacgtcttcatggttcctcagtacggctatttaactttaaacaatggaagccaagccctgggacgttcctccttctactgtctggagtatttcccatcgcagatgctgagaaccggcaacaactttcagttcagctacaccttcgaggacgtgcctttccacagcagctacgcgcacagccagagcctggacaggctgatgaatcccctcatcgaccagtacctgtactacctggtcagaacgcaaacgactggaactggagggacgcagactctggcattcagccaagcgggtcctagctcaatggccaaccaggctagaaattgggtgcccggaccttgctaccggcagcagcgcgtctccacgacaaccaaccagagcaacaacagcaactttgcctggacgggagctgccaagtttaagctgaacggccgagactctctaatgaatccgggcgtggcaatggcttcccacaaggatgacgacgaccgcttcttcccttcgagcggggtcctgatttttggcaagcaaggagccgggaacgatggagtggattacagccaagtgctgattacagatgaggaagaaatcaaggctaccaaccccgtggccacagaagaatatggagcagtggccatcaacaaccaggccgccaatacgcaggcgcagaccggactcgtgcacaaccagggggtgattcccggcatggtgtggcagaatagagacgtgtacctgcagggtcccatctgggccaaaattcctcacacggacggcaactttcacccgtctcccctgatgggcggctttggactgaagcacccgcctcctcaaattctcatcaagaacacaccggttccagcggacccgccgcttaccttcaaccaggccaagctgaactctttcatcacgcagtacagcaccggacaggtcagcgtggaaatcgagtgggagctgcagaaagaaaacagcaaacgctggaatccagagattcaatacacttccaactactacaaatctacaaatgtggactttgctgtcaacacggaaggagtttatagcgagcctcgccccattggcacccgttacctcacccgcaacctgtaattacatgttaatcaataaaccggttaattcgtttcagttgaactttggtctctgcgaagggcgaattc

SEQ ID NO: 77 - protein, 736 aa, Artificial Sequence
  Description of Artificial Sequence: Synthetic polypeptide
MAADGYLPDWLEDNLSEGIREWWDLKPGAPKPKANQQKQDDGRGLVLPGYKYLGPFNGLDKGEPVNAADAAALEHDKAYDQQLKAGDNPYLRYNHADAEFQERLQEDTSFGGNLGRAVFQAKKRVLEPLGLVEEGAKTAPGKKRPVEQSPQEPDSSSGIGKTGQQPAKKRLNFGQTGDSESVPDPQPLGEPPAAPSGLGPNTMASGGGAPMADNNEGADGVGNSSGNWHCDSTWLGDRVITTSTRTWALPTYNNHLYKQISNGTSGGSTNDNTYFGYSTPWGYFDFNRFHCHFSPRDWQRLINNNWGFRPKRLNFKLFNIQVKEVTTNEGTKTIANNLTSTVRVFTDSEYQLPYVLGSAHQGCLPPFPADVFMVPQYGYLTLNNGSQALGRSSFYCLEYFPSQMLRTGNNFQFSYTFEDVPFHSSYAHSQSLDRLMNPLIDQYLYYLVRTQTTGTGGTQTLAFSQAGPSSMANQARNWVPGPCYRQQRVSTTTNQSNNSNFAWTGAAKFKLNGRDSLMNPGVAMASHKDDDDRFFPSSGVLIFGKQGAGNDGVDYSQVLITDEEEIKATNPVATEEYGAVAINNQAANTQAQTGLVHNQGVIPGMVWQNRDVYLQGPIWAKIPHTDGNFHPSPLMGGFGLKHPPPQILIKNTPVPADPPLTFNQAKLNSFITQYSTGQVSVEIEWELQKENSKRWNPEIQYTSNYYKSTNVDFAVNTEGVYSEPRPIGTRYLTRNL

SEQ ID NO: 78 - DNA, 3121 bp, Adeno-associated virus
gaattcgcccttctacggctgcgtcaactggaccaatgagaactttcccttcaacgattgcgtcgacaagatggtgatctggtgggaggagggcaagatgacggccaaggtcgtggagtccgccaaggccattctcggcggcagcaaggtgcgtgtggaccaaaagtgcaagtcttccgcccagatcgatcccacccccgtgatcgtcacctccaacaccaacatgtgcgccgtgattgacgggaacagcaccaccttcgagcaccagcagccgttgcaggaccggatgttcaaatttgaactcacccgccgtctggagcatgactttggcaaggtgacgaagcaggaagtcaaagagttcttccgctgggcgcaggatcacgtgaccgaggtggcgcatgagttccacgtcagaaagggtggcgccaacaagagacccgcccccgatgacgcggatataagcgagcccaagcgggcctgcccctcagtcgcggatccatcgacgtcagacgcggaaggagctccggtggactttgccgacaggtaccaaaacaaatgttctcgtcacgcgggcatgcttcagatgctgtttccctgcaagacatgcgagagaatgaatcagaatttcaacatttgcttcacgcacgggaccagagactgttcagaatgtttccccggcgtgtcagaatctcaaccggtcgtcagaaagaggacgtatcggaaactctgtgcgattcatcatctgctggggcgggctcccgagattgcttgctcggcctgcgatctggtcaacgtggacctggatgactgtgtttctgagcaataaatgacttaaaccaggtatggctgccgatggttatcttccagattggctcgaggacaacctctctgagggcattcgcgagtggtgggacttgaaacctggagccccgaaacccaaagccaaccagcaaaagcaggacgacggccggggtctggtgcttcctggctacaagtacctcggacccttcaacggactcgacaagggggagcccgtcaacgcggcggacgcagcggccctcgagcacgacaaagcctacgaccagcagctcaaagcgggtgacaatccgtacctgcggtataatcacgccgacgccgagtttcaggagcgtctgcaagaagatacgtcctttgggggcaacctcgggcgagcagtcttccaggccaagaagcgggttctcgaacctctcggtctggttgaggaaggcgctaagacggctcctggaaagaagagaccggtagagcagtcgccacaagagccagactcctcctcgggcatcggcaagacaggccagcagcccgctaaaaagagactcaattttggtcagactggcgactcagagtcagtccccgacccacaacctctcggagaacctccagcagccccctcaggtctgggacctaatacaatggcttcaggcggtggcgctccaatggcagacaataacgaaggcgccgacggagtgggtaattcctcgggaaattggcattgcgattccacatggctgggggacagagtcatcaccaccagcacccgaacctgggccctgcccacctacaacaaccacctctacaagcaaatctccaacggcacctcgggaggaagcaccaacgacaacacctattttggctacagcaccccctgggggtattttgacttcaacagattccactgtcacttttcaccacgtgactggcaacgactcatcaacaacaattggggattccggcccaaaagactcaacttcaagctgttcaacatccaggtcaaggaagtcacgacgaacgaaggcaccaagaccatcgccaataatctcaccagcaccgtgcaggtctttacggacttggagtaccagttaccgtacgtgctaggatccgctcaccagggatgtctgcctccgttcccggcggacgtcttcatggttcctcagtacggctatttaactttaaacaatggaagccaagccctgggacgttcctccttctactgtctggagtatttcccatcgcagatgccgagaaccggcaacaactttcagttcagctacaccttcgaggacgtgcctttccacagcagctacgcgcacagccagagcctggacaggctgatgaatcccctcatcgaccagtacctgtactacctggtcagaacgcaaacgactggaactggagggacgcagactctggcattcagccaagcgggtcctagctcaatggccaaccaggctagaaattgggtgcccggaccttgctaccggcagcagcgcgtctccacgacaaccaaccagaacaacaacagcaactttgcctggacgggagctgccaagtttaagctgaacggccgagactctctaatgaatccgggcgtggcaatggcttcccacaaggatgacgacgaccgcttcttcccttcgagcggggtcctgatttttggcaagcaaggagccgggaacgatggagtggattacagccaagtgctgattacagatgaggaagaaatcaaggctaccaaccccgtggccacagaagaatatggagcagtggccatcaacaaccaggccgccaatacgcaggcgcagaccggactcgtgcacaaccagggggtgattcccggcatggtgtggcagaatagagacgtgtacctgcagggtcccatctgggccaaaattcctcacacggacggcaactttcacccgtctcccctgatgggcggctttggactgaagcacccgcctcctcaaattctcatcaagaacacaccggttccagcggacccgccgcttaccttcaaccaggccaagctgaactctttcatcacgcagtacagcaccggacaggtcagcgtggaaatcgagtgggagctgcagaaagaaaacagcaaacgctggaatccagagattcaatacacttccaactactacaaatctacaaatgtggactttgctgtcaacacggaaggagtttatagcgagcctcgccccattggcacccgttacctcacccgcaacctgtaattacatgttaatcaataaaccggttaattcgtttcagttgaactttggtctctgcgaagggcgaattc

SEQ ID NO: 79 - protein, 736 aa, Artificial Sequence
  Description of Artificial Sequence: Synthetic polypeptide
MAADGYLPDWLEDNLSEGIREWWDLKPGAPKPKANQQKQDDGRGLVLPGYKYLGPFNGLDKGEPVNAADAAALEHDKAYDQQLKAGDNPYLRYNHADAEFQERLQEDTSFGGNLGRAVFQAKKRVLEPLGLVEEGAKTAPGKKRPVEQSPQEPDSSSGIGKTGQQPAKKRLNFGQTGDSESVPDPQPLGEPPAAPSGLGPNTMASGGGAPMADNNEGADGVGNSSGNWHCDSTWLGDRVITTSTRTWALPTYNNHLYKQISNGTSGGSTNDNTYFGYSTPWGYFDFNRFHCHFSPRDWQRLINNNWGFRPKRLNFKLFNIQVKEVTTNEGTKTIANNLTSTVQVFTDLEYQLPYVLGSAHQGCLPPFPADVFMVPQYGYLTLNNGSQALGRSSFYCLEYFPSQMPRTGNNFQFSYTFEDVPFHSSYAHSQSLDRLMNPLIDQYLYYLVRTQTTGTGGTQTLAFSQAGPSSMANQARNWVPGPCYRQQRVSTTTNQNNNSNFAWTGAAKFKLNGRDSLMNPGVAMASHKDDDDRFFPSSGVLIFGKQGAGNDGVDYSQVLITDEEEIKATNPVATEEYGAVAINNQAANTQAQTGLVHNQGVIPGMVWQNRDVYLQGPIWAKIPHTDGNFHPSPLMGGFGLKHPPPQILIKNTPVPADPPLTFNQAKLNSFITQYSTGQVSVEIEWELQKENSKRWNPEIQYTSNYYKSTNVDFAVNTEGVYSEPRPIGTRYLTRNL

SEQ ID NO: 80 - DNA, 3122 bp, Adeno-associated virus
gaattcgccctttctacggctgcgtcaactggaccaatgagaactttcccttcaacgattgcgtcgacaagatggtgatctggtgggaggagggcaagatgacggccaaggtcgtggagtccgccaaggccattctcggcggcagcaaggtgcgtgtggaccaaaagtgcaagtcttccgcccagatcgatcccacccccgtgatcgtcacctccaacaccaacatgtgcgccgtgattgacgggaacagcaccaccttcgagcaccagcagccgttgcaggaccggatgttcaaatttgaactcacccgccgtctggagcatgactttggcaaggtgacgaagcaggaagtcaaagggttcttccgctgggcgcaggatcacgtgaccgaggtggcgcatgagttccacgtgcgagcccaagcgggcctgcccctcagtcgcggatccatcgacgtcagaccagaaagggtggagccaacaagagacccgcccccgatgacgcggatataagcggaaggagctccggtggactttgccgacaggtaccaaaacaaatgttctcgtcacgcgggcatgcttcagatgctgtttccctgcaagacatgcgagagaatgaatcagaatttcaacatttgcttcacgcacgggaccagagactgttcagaatgtttccccggcgtgtcagaatctcaaccggtcgtcagaaagaggacgtatcggaaactctgtgcgattcatcatctgctggggcgggctcccgagattgcttgctcggcctgcgatctggtcaacgtggacctggatgactgtgtttctgagcaataaatgacttaaaccaggtatggctgccgatggttatcttccagattggctcgaggacaacctctctgagggcattcgcgagtggtgggacttgaaacctggagccccgaaacccaaagccaaccagcaaaagcaggacgacggccggggtctggtgcttcctggctacaagtacctcggacccttcaacggactcgacaagggggagcccgtcaacgcggcggacgcagcggccctcgagcacgacaaagcctacgaccagcagctcaaagcgggtgacaatccgtacctgcggtataatcacgccgacgccgagtttcaggagcgtctgcaagaagatacgtcttttgggggcaacctcgggcgagcagtcttccaggccaagaagcgggttctcgaacctctcggtctggttgaggaaggcgctaagacggctcctggaaagaagagaccggtagagcagtcgccacaagagccagactcctcctcgggcatcggcaagacaggccagcagcccgctaaaaagagactcaattttggtcagactggcgactcagagtcagtccccgacccacaacctctcggagaacctccagcagccccctcaggtctgggacctaatacaatggcttcaggcggtggcgctccaatggcagacaataacgaaggcgccgacggagtgggtaattcctcgggaaattggcattgcgattccacatggctgggggacagagtcatcaccaccagcacccgaacctgggccctgcccacctacaacaaccacctctacaagcaaatctccaacggcacctcgggaggaagcaccaacgacaacacctattttggctacagcaccccctgggggtattttgacttcaacagattccactgtcacttttcaccacgtgactggcaacgactcatcaacaacaattggggattccggcccaaaagactcaacttcaagctgttcaacatccaggtcaaggaagtcacgacgaacgaaggcaccaagaccatcgccaataatctcaccagcaccgtgcaggtctttacggactcggagtaccagttaccgtacgtgctaggatccgctcaccagggatgtctgcctccgttcccggcggacgtcttcatggttcctcagtacggctatttaactttaaacaatggaagccaagccctgggacgttcctccttctactgtctggagtatttcccatcgcagatgctgagaaccggcaacaactttcagttcagctacaccttcgaggacgtgcctttccacagcagctacgcgcacagccagagcctggacaggctgatgaatcccctcatcgaccagtacctgtactacctggtcagaacgcaaacgactggaactggagggacgcagactctggcattcagccaagcgggtcctagctcaatggccaaccaggctagaaattgggtgcccggaccttgctaccggcagcagcgcgtctccacgacaaccaaccagaacaacaacagcaactttgcctggacgggagctgccaagtttaagctgaacggccgagactctctaatgaatccgggcgtggcaatggcttcccacaaggatgacgacgaccgcttcttcccttcgagcggggtcctgatttttggcaagcaaggagccgggaacgatggagtggattacagccaagtgctgattacagatgaggaagaaatcaaggctaccaaccccgtggccacagaagaatatggagcagtggccatcaacaaccaggccgccaatacgcaggcgcagaccggactcgtgcacaaccagggggtgattcccggcatggtgtggcagaatagagacgtgtacctgcagggtcccatctgggccaaaattcctcacacggacggcaactttcacccgtctcccctgatgggcggctttggactgaagcacccgcctcctcaaattctcatcaagaacacaccggttccagcggacccgccgcttaccttcaaccaggccaagctgaactctttcatcacgcagtacagcaccggacaggtcagcgtggaaatcgagtgggagctgcagaaagaaaacagcaaacgctggaatccagagattcaatacacttccaactactacaaatctacaaatgtggactttgctgtcaacacggagggggtttatagcgagcctcgccccattggcacccgttacctcacccgcaacctgtaattacatgttaatcaataaaccggttaattcgtttcagttgaactttggtctctgcgaagggcgaattc

SEQ ID NO: 81 - protein, 736 aa, Artificial Sequence
  Description of Artificial Sequence: Synthetic polypeptide
MAADGYLPDWLEDNLSEGIREWWDLKPGAPKPKANQQKQDDGRGLVLPGYKYLGPFNGLDKGEPVNAADAAALEHDKAYDQQLKAGDNPYLRYNHADAEFQERLQEDTSFGGNLGRAVFQAKKRVLEPLGLVEEGAKTAPGKKRPVEQSPQEPDSSSGIGKTGQQPAKKRLNFGQTGDSESVPDPQPLGEPPAAPSGLGPNTMASGGGAPMADNNEGADGVGNSSGNWHCDSTWLGDRVITTSTRTWALPTYNNHLYKQISNGTSGGSTNDNTYFGYSTPWGYFDFNRFHCHFSPRDWQRLINNNWGFRPKRLNFKLFNIQVKEVTTNEGTKTIANNLTSTVQVFTDSEYQLPYVLGSAHQGCLPPFPADVFMVPQYGYLTLNNGSQALGRSSFYCLEYFPSQMLRTGNNFQFSYTFEDVPFHSSYAHSQSLDRLMNPLIDQYLYYLVRTQTTGTGGTQTLAFSQAGPSSMANQARNWVPGPCYRQQRVSTTTNQNNNSNFAWTGAAKFKLNGRDSLMNPGVAMASHKDDDDRFFPSSGVLIFGKQGAGNDGVDYSQVLITDEEEIKATNPVATEEYGAVAINNQAANTQAQTGLVHNQGVIPGMVWQNRDVYLQGPIWAKIPHTDGNFHPSPLMGGFGLKHPPPQILIKNTPVPADPPLTFNQAKLNSFITQYSTGQVSVEIEWELQKENSKRWNPEIQYTSNYYKSTNVDFAVNTEGVYSEPRPIGTRYLTRNL

SEQ ID NO: 82 - DNA, 2370 bp, Adeno-associated virus
gaattcgccctttctacggctgcgtcaactggaccaatgagaactttcccttcaacgattgcgtcgacaagatggtgatctggtgggaggagggcaagatgacggccaaggtcgtggagtccgccaaggccattctcggcggcagcaaggtgcgcgtggaccaaaagtgcaagtcgtccgcccagatcgaccccacccccgtgatcgtcacctccaacaccaacatgtgcgccgtgattgacgggaacagcaccaccttcgagcaccagcagccgttgcaggaccggatgttcaagttcgaactcacccgccgtctggagcacgactttggcaaggtgaccaagcaggaagtcaaagagttcttccgctgggcgcaggatcacgtgaccgaggtggcgcatgagttctacgtcagaaagggcggagccagcaaaagacccgcccccgatgacgcggatataagcgagcccaagcgggcctgcccctcagtcgcggatccatcgacgtcagacgcggaaggagctccggtggactttgccgacaggtaccaaaacaaatgttctcgtcacgcgggcatgcttcagacgctgtttccctgcaaaacgtgcgagagaatgaatcagaatttcaacatttgcttcacgcacggggtcagagactgctcagaatgtttccccggtgcatcagaatctcaaccggtcgtcagaaaaaaaacgtatcagaaactgtgtgccattcatcatctgctggggcgggcacccgagattgcttgctcggcctgcgatctggtcaacgtggacctggacgactgtgtttctgagcaataaatgacttaaaccaggtatggctgccgatggttatcttccagattggcttgaggacaacctctctgagggcattcgcgagtggtgggacctgaaacctggagccccgaaacccaaagccaaccagcaaaagcaggacgacggccggggtctggtgcttcctggctacaagtacctcggacccttcaacggactcgacaagggggagcccgtcaacgcggcggacgcagcggccctcgagcacgacaaggcctacgaccagcagctcaaagcgggtgacaatccgtacctgcggtataaccacgccgacgccgagtttcaggagcgtctgcaagaagatacgtcttttgggggcaacctcgggcgagcagtcttccaggccaagaagcgggttctcgaacctctcggtctggttgaggaaggcgctaagacggctcctggaaagaagagaccggtagagccatcacctcagcgttcccccgactcctccacgggcatcggcaagaaaggccaccagcccgcgagaaagagactgaactttgggcagactggcgactcggagtcagtccccgaccctcaaccaatcggagaaccaccagcaggcccctctggtctgggatctggtacaatggctgcaggcggtggcgctccaatggcagacaataacgaaggcgccgacggagtgggtagttcctcaggaaattggcattgcgattccacatggctgggcgacagagtcatcaccaccagcacccgaacctgggccctgcccacctacaacaaccatctctacaagcaaatctccaacgggacatcgggaggaagcactaacgacaacacctactttggctacagcaccccctgggggtattttgacttcaacagattccactgccacttctcaccacgtgactggcagcgactcatcaacaataactggggattccggcccaagagactcaacttcaagctcttcaacatccaggtcaaggaggtcacgcagaatgaaggcaccaagaccatcgccaataaccttaccagcacgattcaggtgtttacggactcggaataccagctcccgtacgtcctcggctctgcgcaccagggctgcctccctccgttcccggcggacgtcttcatgattcctcagtacgggtatctgaccctaaacaatggcagtcaggctgtgggccgttcctccttctactgcctggaatacttcccttctcaaatgctgaggacgggcaacaactttgaattcagctacaccttcgaggacgtgcctttccacagcagctacgcgcacagccagagcctggaccggctgatgaaccctctcatcgaccagtacctgtattacttatccagaactcagtccacaggaggaactcaaggtactcagcaattgttattttctcaagccgggcccgcaaacatgtyggctcaggccaagaactggctacctggaccgtgttaccgtcagcaacgagtttccacgacactgtcgcaaaacaacaacagcaattttgctggaccggtgccacca

SEQ ID NO: 83 - protein, 738 aa, Artificial Sequence; identical to SEQ ID NO: 73
  Description of Artificial Sequence: Synthetic polypeptide

SEQ ID NO: 84 - DNA, 2205 bp, Adeno-associated virus
atgactgacggttaccttccagattggctagaggacaacctctctgaaggcgttcgagagtggtgggcgctgcaacctggagcccctaaacccaaggcaaatcaacaacatcaggacaacgctcggggtcttgtgcttccgggttacaaatacctcggacccggcaacggactcgacaagggggaacccgtcaacgcagcggacgcggcagccctcgagcacgacaaggcctacgaccagcagctcaaggccggtgacaacccctacctcaagtacaaccacgccgacgcggagttccagcagcggcttcagggcgacacatcgtttgggggcaacctcggcagagcagtcttccaggccaaaaagagggttcttgaacctcttggtctggttgagcaagcgggtgagacggctcctggaaagaagagaccgttgattgaatccccccagcagcccgactcctccacgggtatcggcaaaaaaggcaagcagccggctaaaaagaagctcgttttcgaagacgaaactggagcaggcgacggaccccctgagggatcaacttccggagccatgtctgatgacagtgagatgcgtgcagcagctggcggagctgcagtcgagggcggacaaggtgccgatggagtgggtaatgcctcgggtgattggcattgcgattccacctggtctgagggccacgtcacgaccaccagcaccagaacctgggtcttgcccacctacaacaaccacctctacaagcgactcggagagagcctgcagtccaacacctacaacggattctccaccccctggggatactttgacttcaaccgcttccactgccacttctcaccacgtgactggcagcgactcatcaacaacaactggggcatgcgacccaaagccatgcgggtcaaaatcttcaacatccaggtcaaggaggtcacgacgtcgaacggcgagacaacggtggctaataaccttaccagcacggttcagatctttgcggactcgtcgtacgaactgccgtacgtgatggatgcgggtcaagagggcagcctgcctccttttcccaacgacgtctttatggtgccccagtacggctactgtggactggtgaccggcaacacttcgcagcaacagactgacagaaatgccttctactgcctggagtactttccttcgcagatgctgcggactggcaacaactttgaaattacgtacagttttgagaaggtgcctttccactcgatgtacgcgcacagccagagcctggaccggctgatgaaccctctcatcgaccagtacctgtggggactgcaatcgaccaccaccggaaccaccctgaatgccgggactgccaccaccaactttaccaagctgcggcctaccaacttttccaactttaaaaagaactggctgcccgggccttcaatcaagcagcagggcttctcaaagactgccaatcaaaactacaagatccctgccaccgggtcagacagtctcatcaaatacgagacgcacagcactctggacggaagatggagtgccctgacccccggacctccaatggccacggctggacctgcggacagcaagttcagcaacagccagctcatctttgcggggcctaaacagaacggcaacacggccaccgtacccgggactctgatcttcacctctgaggaggagctggcagccaccaacgccaccgatacggacatgtggggcaacctacctggcggtgaccagagcaacagcaacctgccgaccgtggacagactgacagccttgggagccgtgcctggaatggtctggcaaaacagagacatttactaccagggtcccatttgggccaagattcctcataccgatggacactttcacccctcaccgctgattggtgggtttgggctgaaacacccgcctcctcaaatttttatcaagaacaccccggtacctgcgaatcctgcaacgaccttcagctctactccggtaaactccttcattactcagtacagcactggccaggtgtcggtgcagattgactgggagatccagaaggagcggtccaaacgctggaaccccgaggtccagtttacctccaactacggacagcaaaactctctgttgtgggctcccgatgcggctgggaaatacactgagcctagggctatcggtacccgctacctcacccaccacctgtaa

SEQ ID NO: 85 - protein, 734 aa, Adeno-associated virus; identical to SEQ ID NO: 57

SEQ ID NO: 86 - DNA, 3128 bp, Adeno-associated virus
gaattcgccctttctacggctgcgtcaactggaccaatgagaactttcccttcaacgattgcgtcgacaagatgttgatctggtgggaggagggcaagatgacggccaaggtcgtggagtccgccaaggccattctcggcggcagcaaagtgcgcgtggaccaaaagtgcaagccgtccgcccagatcgaccccacccccgtgatcgtcacctccaacaccaacatgtgcgccgtgattgacgggaacagcaccaccttcgagcaccagcagccgttgcgggaccggatgttcaagtttgaactcacccgccgtctggagcacgactttggcaaggtgacaaagcaggaagtcagagagttcttccgctgggcgcaggatcacgtgaccgaggtggcgcacgagttctacgtcagaaagggtggagccaacaagagacccgcccccgatgacgcggataaaagcgagcccaagcgggcctgcccctcagtcgcggatccatcgacgtcagacgcggaaggagctccggtggactttgccgacaggtaccaaaacaaatgttctcgtcacgcgggcatgcttcagatgctgtttccctgcaaaacatgcgagagaatgaatcagaatttcaacatttgcttcacgcacgggaccagagactgttcagaatgtttccccggcgtgtcagaatctcaaccggtcgtcagaaaaaagacgtatcggaaactctgtgcgattcatcatctgctggggcgggcacccgagattgcttgctcggcctgcgatctggtcaacgtggacctagatgactgtgtttctgagcaataaatgacttaaaccaggtatggctgccgatggttatcttccagattggctcgaggacaacctctctgagggcattcgcgagtggtgggacttgaaacctggagccccgaaacccaaagccaaccagcaaaagcaggacgacggccggggtctggtgcttcctggctacaagtacctcggacccttcaacggactcgacaagggggagcccgtcaacgcggcggacgcagcggccctcgagcacgacaaggcctacgaccagcagctcaaagcgggtgacaatccgtacctgcggtataaccacgccgacgccgagtttcaggagcgtctgcaagaagatacgtcttttgggggcaacctcgggcgagcagtcttccaggccaagaagcgggttctcgaacctctcggtctggttgaggaaggcgctaagacggctcctggaaagaagagaccggtagagccatcaccccagcgttctccagactcctctacgggcatcggcaagaaaggccagcagcccgcgaaaaagagactcaactttgggcagactggcgactcagagtcagtgcccgaccctcaaccaatcggagaaccccccgcaggcccctctggtctgggatctggtacaatggctgcaggcggtggcgctccaatggcagacaataacgaaggcgccgacggagtgggtagttcctcaggaaattggcattgcgattccacatggctgggcgacagagtcatcaccaccagcacccgaacctgggccctccccacctacaacaaccacctctacaagcaaatctccaacgggacttcgggaggaagcaccaacgacaacacctacttcggctacagcaccccctgggggtattttgactttaacagattccactgccacttctcaccacgtgactggcagcgactcatcaacaacaactggggattccggcccaagagactcaacttcaagctcttcaacatccaggtcaaggaggtcacgcagaatgaaggcaccaagaccatcgccaataaccttaccagcacgattcaggtctttacggactcggaataccagctcccgtacgtcctcggctctgcgcaccagggctgcctgcctccgttcccggcggacgtcttcatgattcctcagtacgggtacctgactctgaacaatggcagtcaggccgtgggccgttcctccttctactgcctggagtactttccttctcaaatgctgagaacgggcaacaactttgagttcagctaccagtttgaggacgtgccttttcacagcagctacgcgcacagccaaagcctggaccggctgatgaaccccctcatcgaccagtacctgtactacctgtctcggactcagtccacgggaggtaccgcaggaactcagcagttgctattttctcaggccgggcctaataacatgtcggctcaggccaaaaactggctacccgggccctgctaccggcagcaacgcgtctccacgacactgtcgcaaaataacaacagcaactgtaaatcccggtgtcgctatggcaacccacaaggacgacgaagagcgattttgcctggaccggtgccaccaagtatcatctgaatggcagagactctctgttttccgtccagcggagtcttaatgtttgggaaacagggagctggaaaagacaacgtggactatagcagcgttatgctaaccagtgaggaagaaattaaaaccaccaacccagtggccacggaacagtacggcgtggtggccgataacctgcaacagcaaaacgccgctcctattgtaggggccgtcaacagtcaaggagccttacctggcatggtctggcagaaccgggacgtgtacctgcagggtcctatctgggccaagattcctcacacggacggaaactttcatccctcgccgctgatgggaggctttggactgaaacacccgcctcctcagatcctgattaagaatacacctgttcccgcggatcctccaactaccttcagtcaagctaagctggcgtcgttcatcacgcagtacagcaccggacaggtcagcgtggaaattgaatgggagctgcagaaagaaaacagcaaacgctggaacccagagattcaatacacttccaactactacaaatctacaaatgtggacttcgctgttaacacagatggcacttattctgagcctcgccccattggcacccgttacctcacccgtaatctgtaattgctcgttaatcaataaaccggttgattcgtttcagttgaactttggtctctgcgaagggcgaattc

SEQ ID NO: 87 - protein, 738 aa, Artificial Sequence; identical to SEQ ID NO: 7
  Description of Artificial Sequence: Synthetic polypeptide

SEQ ID NO: 88 - DNA, 3128 bp, Adeno-associated virus
gaattcgccctttctacggctgcgtcaactggaccaatgagaactttcccttcaacgattgcgtcgacaagatggtgatctggtgggaggagggcaagatgacggccaaggtcgtggagtccgccaaggccattctcggcggcagcaaagtgcgcgtggaccaaaagtgcaagtcgtccgcccagatcgaccccacccccgtgatcgtcacctccaacaccaacatgtgcgccgtgattgacgggaacagcaccaccttcgagcaccagcagccgttgcaggaccggatgttcaagtttgaactcacccgccgtctggagcacgactttggcaaggtgacaaagcaggaagtcagagagttcttccgctgggcgcaggatcacgtgaccgaggtggcgcacgagttctacgtcagaaagggtggagccaacaagagacccgcccccgatgacgcggataaaagcgagcccaagcgggcctgcccctcagtcgcggatccatcgacgtcagacgcggaaggagctccggtggactttgccgacaggtaccaaaacaaatgttctcgtcacgcgggcatgcttcagatgctgtttccctgcaaaacatgcgagagaatgaatcagaatttcaacatttgcttcacgcacgggaccagagactgttcagaatgtttccccggcgtgtcagaatctcaaccggttgtcagaaaaaagacgtatcggaaactctgtgcgattcatcatctgctggggcgggcacccgagattgcttgctcggcctgcgatctggtcaacgtggacctagatgactgtgtttctgagcaataaatgacttaaaccaggtatggctgccgatggttatcttccagattggctcgaggacaacctctctgagggcattcgcgagtggtgggacttgaaacctggagccccgaaacccaaagccaaccagcaaaagcaggacgacggccggggtctggtgcttcctggctacaagtacctcggacccttcaacggactcgacaagggggagcccgtcaacgcggcggacgcagcggccctcgagcacgacaaggcctacgaccagcagctcaaagcgggtgacaatccgtacctgcggtataaccacgccgacgccgagtttcaggagcgtctgcaagaagatacgtcttttgggggcaacctcgggcgagcagtcttccaggccaagaagcgggttctcgaacctctcggtctggttgaggaaggcgctaagacggctcctggaaagaagagaccggtagagccatcaccccagcgttctccagactcctctacgggcatcggcaagaaaggccagcagcccgcgaaaaagagactcaactttgggcagactggcgactcagagtcagtgcccgaccctcaaccaatcggagaaccccccgcaggcccctctggtctgggatctggtacaatggctgcaggcggtggcgctccaatggcagacaataacgaaggcgccgacggagtgggtagttcctcaggaaattggcattgcgattccacatggctgggcgacagagtcatcaccaccagcacccgaacctgggccctccccacctacaacaaccacctctacaagcaaatctccaacgggacttcgggaggaagcaccaacgacaacacctacttcggctacagcaccccctgggggtattttgactttaacagattccactgccacttctcaccacgtgactggcagcgactcatcaacaacaactggggattccggcccaagagacccaacttcaagctcttcaacatccaggtcaaggaggtcacgcagaatgaaggcaccaagaccatcgccaataaccttaccagcacgattcaggtctttacggactcggaataccagctcccgtacgtcctcggctctgcgcaccagggctgcctgcctccgttcccggcggacgtcttcatgattcctcagtacgggtacctgactctgaacaatggcagtcaggccgtgggccgttcctccttctactgcctggagtactttccttctcaaatgctgagaacgggcaacaactttgagttcagctaccagtttgaggacgtgccttttcacagcagctacgcgcacagccaaagcctggaccggctgatgaaccccctcatcgaccagtacctgtactacctgtctcggactcagtccacgggaggtaccgcaggaactcagcagttgctattttctcaggccgggcctaataacatgtcggctcaggccaaaaactggctacccgggccctgctaccggcagcaacgcgtctccacgacactgtcgcaaaataacaacagcaactttgcctggaccggtgccaccaagtatcatctgaatggcagagactctctggtaaatcccggtgtcgctatggcaacccacaaggacgacgaagagcgattttttccgtccagcggagtcttaatgtttgggaaacagggagctggaaaagacaacgtggactatagcagcgttatgctaaccagtgaggaagaaattaaaaccaccaacccagtggccacagaacagtacggcgtggtggccgataacctgcaacagcaaaacgccgctcctattgtaggggccgtcaacagtcaaggagccttacctggcatggtctggcagaaccgggacgtgtacctgcagggtcctatctgggccaagattcctcacacggacggaaactttcatccctcgccgctgatgggaggctttggactgaaacacccgcctcctcagatcctgattaagaatacacctgttcccgcggatcctccaactaccttcagtcaagctaagctggcgtcgttcatcacgcagtacagcaccggacaggtcagcgtggaaattgaatgggagctgcagaaagaaaacagcaaacgctggaacccagagattcaatacacttccaactactacaaatctacaaatgtggactttgctgttaacacagatggcacttattctgagcctcgccccattggcacccgttacctcacccgtaatctgtaattgcttgttaatcaataaaccggttgattcgtttcagttgaactttggtctctgcgaagggcgaattc

SEQ ID NO: 89 - protein, 738 aa, Artificial Sequence
  Description of Artificial Sequence: Synthetic polypeptide
MAADGYLPDWLEDNLSEGIREWWDLKPGAPKPKANQQKQDDGRGLVLPGYKYLGPFNGLDKGEPVNAADAAALEHDKAYDQQLKAGDNPYLRYNHADAEFQERLQEDTSFGGNLGRAVFQAKKRVLEPLGLVEEGAKTAPGKKRPVEPSPQRSPDSSTGIGKKGQQPAKKRLNFGQTGDSESVPDPQPIGEPPAGPSGLGSGTMAAGGGAPMADNNEGADGVGSSSGNWHCDSTWLGDRVITTSTRTWALPTYNNHLYKQISNGTSGGSTNDNTYFGYSTPWGYFDFNRFHCHFSPRDWQRLINNNWGFRPKRPNFKLFNIQVKEVTQNEGTKTIANNLTSTIQVFTDSEYQLPYVLGSAHQGCLPPFPADVFMIPQYGYLTLNNGSQAVGRSSFYCLEYFPSQMLRTGNNFEFSYQFEDVPFHSSYAHSQSLDRLMNPLIDQYLYYLSRTQSTGGTAGTQQLLFSQAGPNNMSAQAKNWLPGPCYRQQRVSTTLSQNNNSNFAWTGATKYHLNGRDSLVNPGVAMATHKDDEERFFPSSGVLMFGKQGAGKDNVDYSSVMLTSEEEIKTTNPVATEQYGVVADNLQQQNAAPIVGAVNSQGALPGMVWQNRDVYLQGPIWAKIPHTDGNFHPSPLMGGFGLKHPPPQILIKNTPVPADPPTTFSQAKLASFITQYSTGQVSVEIEWELQKENSKRWNPEIQYTSNYYKSTNVDFAVNTDGTYSEPRPIGTRYLTRNL

SEQ ID NO: 90 - protein, 738 aa, Adeno-associated virus
MAADGYLPDWLEDNLSEGIREWWDLKPGAPKPKANQQKQDDGRGLVLPGYKYLGPFNGLDKGEPVNAADAAALEHDKAYDQQLKAGDNPYLRYNHADAEFQERLQEDTSFGGNLGRAVFQAKKRVLEPLGLVEEAAKTAPGKKRPVEPSPQRSPDSSTGIGKKGQQPAKKRLNFGQTGDSESVPDPQPIGEPPAGPSGLGSGTMAAGGGAPMADNNEGADGVGSSSGNWHCDSTWLGDRVITTSTRTWALPTYNNHLYKQISNGTSGGSTNDNTYFGYSTPWGYFDFNRFHCHFSPRDWQRLINNNWGFRPKRLSFKLFNIQVKEVTQNEGTKTIANNLTSTIQVFTDSEYQLPYVLGSAHQGCLPPFPADVFMIPQYGYLTLNNGSQAVGRSSFYCLEYFPSQMLRTGNNFEFSYTFEDVPFHSSYAHSQSLDRLMNPLIDQYLYYLSRTQSTGGTQGTQQLLFSQAGPANMSAQAKNWLPGPCYRQQRVSTTLSQNNNSNFAWTGATKYHLNGRDSLVNPGVAMATHKDDEERFFPSSGVLMFGKQGAGRDNVDYSSVMLTSEEEIKTTNPVATEQYGVVADNLQQTNTGPIVGNVNSQGALPGMVWQNRDVYLQGPIWAKIPHTDGNFHPSPLMGGFGLKHPPPQILIKNTPVPADPPTTFSQAKLASFITQYSTGQVSVEIEWELQKENSKRWNPEIQYTSNYYKSTNVDFAVNTEGTYSEPRPIGTRYLTRNL

SEQ ID NO: 91 - DNA, 2172 bp, Artificial Sequence
  Description of Artificial Sequence: Synthetic polynucleotide
atgtcttttgttgatcaccctccagattggttggaagaagttggtgaaggtcttcgcgagtttttgggccttgaagcgggcccaccgaaaccaaaacccaatcagcagcatcaagatcaagcccgtggtcttgtgctgcctggttataactatctcggacccggaaacggtctcgatcgaggagagcctgtcaacagggcagacgaggtcgcgcgagagcacgacatctcgtacaacgagcagcttgaggcgggagacaacccctacctcaagtacaaccacgcggacgccgagtttcaggagaagctcgccgacgacacatccttcgggggaaacctcggaaaggcagtctttcaggccaagaaaagggttctcgaaccttttggcctggttgaagagggtgctaagacggcccctaccggaaagcggatagacgaccactttccaaaaagaaagaaggctcggaccgaagaggactccaagccttccacctcgtcagacgccgaagctggacccagcggatcccagcagctgcaaatcccagcccaaccagcctcaagtttgggagctgatacaatgtctgcgggaggtggcggcccattgggcgacaataaccaaggtgccgatggagtgggcaatgcctcgggagattggcattgcgattccacgtggatgggggacagagtcgtcaccaagtccacccgaacctgggtgctgcccagctacaacaaccaccagtaccgagagatcaaaagcggctccgtcgacggaagcaacgccaacgcctactttggatacagcaccccctgggggtactttgactttaaccgcttccacagccactggagcccccgagactggcaaagactcatcaacaactactggggcttcagaccccggtccctcagagtcaaaatcttcaacattcaagtcaaagaggtcacggtgcaggactccaccaccaccatcgccaacaacctcacctccaccgtccaagtgtttacggacgacgactaccagctgccctacgtcgtcggcaacgggaccgagggatgcctgccggccttccctccgcaggtctttacgctgccgcagtacggttacgcgacgctgaaccgcgacaacacagaaaatcccaccgagaggagcagcttcttctgcctagagtactttcccagcaagatgctgagaacgggcaacaactttgagtttacctacaactttgaggaggtgcccttccactccagcttcgctcccagtcagaacctgttcaagctggccaacccgctggtggaccagtacttgtaccgcttcgtgagcacaaataacactggcggagtccagttcaacaagaacctggccgggagatacgccaacacctacaaaaactggttcccggggcccatgggccgaacccagggctggaacctgggctccggggtcaaccgcgccagtgtcagcgccttcgccacgaccaataggatggagctcgagggcgcgagttaccaggtgcccccgcagccgaacggcatgaccaacaacctccagggcagcaacacctatgccctggagaacactatgatcttcaacagccagccggcgaacccgggcaccaccgccacgtacctcgagggcaacatgctcatcaccagcgagagcgagacgcagccggtgaaccgcgtggcgtacaacgtcggcgggcagatggccaccaacaaccagagctccaccactgcccccgcgaccggcacgtacaacctccaggaaatcgtgcccggcagcgtgtggatggagagggacgtgtacctccaaggacccatctgggccaagatcccagagacgggggcgcactttcacccctctccggccatgggcggattcggactcaaacacccaccgcccatgatgctcatcaagaacacgcctgtgcccggaaatatcaccagcttctcggacgtgcccgtcagcagcttcatcacccagtacagcaccgggcaggtcaccgtggagatggagtgggagctcaagaaggaaaactccaagaggtggaacccagagatccagtacacaaacaactacaacgacccccagtttgtggactttgccccggacagcaccggggaatacagaaccaccagacctatcggaacccgataccttacccgacccctt

SEQ ID NO: 92 - protein, 720 aa, Artificial Sequence
  Description of Artificial Sequence: Synthetic polypeptide
MSFVDHPPDWLEEVGEGLREFLGLEAGPPKPKPNQQHQDQARGLVLPGYNYLGPGNGLDRGEPVNRADEVAREHDISYNEQLEAGDNPYLKYNHADAEFQEKLADDTSFGGNLGKAVFQAKKRVLEPFGLVEEGAKTAPTGKRIDDHFPKRKKARTEEDSKPSTSSDAEAGPSGSQQLQIPAQPASSLGADTMSAGGGGPLGDNNQGADGVGNASGDWHCDSTWMGDRVVTKSTRTWVLPSYNNHQYREIKSGSVDGSNANAYFGYSTPWGYFDFNRFHSHWSPRDWQRLINNYWGFRPRSLRVKIFNIQVKEVTVQDSTTTIANNLTSTVQVFTDDDYQLPYVVGNGTEGCLPAFPPQVFTLPQYGYATLNRDNTENPTERSSFFCLEYFPSKMLRTGNNFEFTYNFEEVPFHSSFAPSQNLFKLANPLVDQYLYRFVSTNNTGGVQFNKNLAGRYANTYKNWFPGPMGRTQGWNLGSGVNRASVSAFATTNRMELEGASYQVPPQPNGMTNNLQGSNTYALENTMIFNSQPANPGTTATYLEGNMLITSESETQPVNRVAYNVGGQMATNNQSSTTAPATGTYNLQEIVPGSVWMERDVYLQGPIWAKIPETGAHFHPSPAMGGFGLKHPPPMMLIKNTPVPGNITSFSDVPVSSFITQYSTGQVTVEMEWELKKENSKRWNPEIQYTNNYNDPQFVDFAPDSTGEYRTTRPIGTRYL

SEQ ID NO: 93 - protein, 724 aa, Adeno-associated virus 5
MSFVDHPPDWLEEVGEGLREFLGLEAGPPKPKPNQQHQDQARGLVLPGYNYLGPGNGLDRGEPVNRADEVAREHDISYNEQLEAGDNPYLKYNHADAEFQEKLADDTSFGGNLGKAVFQAKKRVLEPFGLVEEGAKTAPTGKRIDDHFPKRKKARTEEDSKPSTSSDAEAGPSGSQQLQIPAQPASSLGADTMSAGGGGPLGDNNQGADGVGNASGDWHCDSTWMGDRVVTKSTRTWVLPSYNNHQYREIKSGSVDGSNANAYFGYSTPWGYFDFNRFHSHWSPRDWQRLINNYWGFRPRSLRVKIFNIQVKEVTVQDSTTTIANNLTSTVQVFTDDDYQLPYVVGNGTEGCLPAFPPQVFTLPQYGYATLNRDNTENPTERSSFFCLEYFPSKMLRTGNNFEFTYNFEEVPFHSSFAPSQNLFKLANPLVDQYLYRFVSTNNTGGVQFNKNLAGRYANTYKNWFPGPMGRTQGWNLGSGVNRASVSAFATTNRMELEGASYQVPPQPNGMTNNLQGSNTYALENTMIFNSQPANPGTTATYLEGNMLITSESETQPVNRVAYNVGGQMATNNQSSTTAPATGTYNLQEIVPGSVWMERDVYLQGPIWAKIPETGAHFHPSPAMGGFGLKHPPPMMLIKNTPVPGNITSFSDVPVSSFITQYSTGQVTVEMEWELKKENSKRWNPEIQYTNNYNDPQFVDFAPDSTGEYRTTRPIGTRYLTRPL

SEQ ID NO: 94 - DNA, 2175 bp, Adeno-associated virus 5
atgtcttttgttgatcaccctccagattggttggaagaagttggtgaaggtcttcgcgagtttttgggccttgaagcgggcccaccgaaaccaaaacccaatcagcagcatcaagatcaagcccgtggtcttgtgctgcctggttataactatctcggacccggaaacggtctcgatcgaggagagcctgtcaacagggcagacgaggtcgcgcgagagcacgacatctcgtacaacgagcagcttgaggcgggagacaacccctacctcaagtacaaccacgcggacgccgagtttcaggagaagctcgccgacgacacatccttcgggggaaacctcggaaaggcagtctttcaggccaagaaaagggttctcgaaccttttggcctggttgaagagggtgctaagacggcccctaccggaaagcggatagacgaccactttccaaaaagaaagaaggctcggaccgaagaggactccaagccttccacctcgtcagacgccgaagctggacccagcggatcccagcagctgcaaatcccagcccaaccagcctcaagtttgggagctgatacaatgtctgcgggaggtggcggcccattgggcgacaataaccaaggtgccgatggagtgggcaatgcctcgggagattggcattgcgattccacgtggatgggggacagagtcgtcaccaagtccacccgaacctgggtgctgcccagctacaacaaccaccagtaccgagagatcaaaagcggctccgtcgacggaagcaacgccaacgcctactttggatacagcaccccctgggggtactttgactttaaccgcttccacagccactggagcccccgagactggcaaagactcatcaacaactactggggcttcagaccccggtccctcagagtcaaaatcttcaacattcaagtcaaagaggtcacggtgcaggactccaccaccaccatcgccaacaacctcacctccaccgtccaagtgtttacggacgacgactaccagctgccctacgtcgtcggcaacgggaccgagggatgcctgccggccttccctccgcaggtctttacgctgccgcagtacggttacgcgacgctgaaccgcgacaacacagaaaatcccaccgagaggagcagcttcttctgcctagagtactttcccagcaagatgctgagaacgggcaacaactttgagtttacctacaactttgaggaggtgcccttccactccagcttcgctcccagtcagaacctgttcaagctggccaacccgctggtggaccagtacttgtaccgcttcgtgagcacaaataacactggcggagtccagttcaacaagaacctggccgggagatacgccaacacctacaaaaactggttcccggggcccatgggccgaacccagggctggaacctgggctccggggtcaaccgcgccagtgtcagcgccttcgccacgaccaataggatggagctcgagggcgcgagttaccaggtgcccccgcagccgaacggcatgaccaacaacctccagggcagcaacacctatgccctggagaacactatgatcttcaacagccagccggcgaacccgggcaccaccgccacgtacctcgagggcaacatgctcatcaccagcgagagcgagacgcagccggtgaaccgcgtggcgtacaacgtcggcgggcagatggccaccaacaaccagagctccaccactgcccccgcgaccggcacgtacaacctccaggaaatcgtgcccggcagcgtgtggatggagagggacgtgtacctccaaggacccatctgggccaagatcccagagacgggggcgcactttcacccctctccggccatgggcggattcggactcaaacacccaccgcccatgatgctcatcaagaacacgcctgtgcccggaaatatcaccagcttctcggacgtgcccgtcagcagcttcatcacccagtacagcaccgggcaggtcaccgtggagatggagtgggagctcaagaaggaaaactccaagaggtggaacccagagatccagtacacaaacaactacaacgacccccagtttgtggactttgccccggacagcaccggggaatacagaaccaccagacctatcggaacccgataccttacccgacccctttaa

SEQ ID NO: 95 - DNA, 2208 bp, Adeno-associated virus
atggctgccgatggttatcttccagattggctcgaggacaacctctctgagggcattcgcgagtggtgggacttgaaacctggagccccgaaacccaaagccaaccagcaaaagcaggacgacggccggggtctggtgcttcctggctacaagtacctcggacccttcaacggactcgacaagggggagcccgtcaacgcggcggatgcagcggccctcgagcacgacaaggcctacgaccagcagctcaaagcgggtgacaatccgtacctgcggtataaccacgccgacgccgagtttcaggagcgtctgcaagaagatacgtcttttgggggcaacctcgggcgagcagtcttccaggccaagaagagggttctcgaaccttttggtctggttgaggaaggtgctaagacggctcctggaaagaaacgtccggtagagcagtcgccacaagagccagactcctcctcgggcattggcaagacaggccagcagcccgctaaaaagagactcaattttggtcagactggcgactcagagtcagtccccgacccacaacctctcggagaacctccagcaacccccgctgctgtgggacctactacaatggcttcaggcggtggcgcaccaatggcagacaataacgaaggcgccgacggagtgggtaatgcctcaggaaattggcattgcgattccacatggctgggcgacagagtcatcaccaccagcacccgaacatgggccttgcccacctataacaaccacctctacaagcaaatctccagtgcttcaacgggggccagcaacgacaaccactacttcggctacagcaccccctgggggtattttgatttcaacagattccactgccatttctcaccacgtgactggcagcgactcatcaacaacaattggggattccggcccaagagactcaacttcaagctcttcaacatccaagtcaaggaggtcacgacgaatgatggcgtcacgaccatcgctaataaccttaccagcacggttcaagtcttctcggactcggagtaccagttgccgtacgtcctcggctctgcgcaccagggctgcctccctccgttcccggcggacgtgttcatgattccgcagtacggctacctaacgctcaacaatggcagccaggcagtgggacggtcatccttttactgcctggaatatttcccatcgcagatgctgagaacgggcaataactttaccttcagctacaccttcgaggacgtgcctttccacagcagctacgcgcacagccagagcctggaccggctgatgaatcctctcatcgaccagtacctgtattacctgaacagaactcagaatcagtccggaagtgcccaaaacaaggacttgctgtttagccgggggtctccagctggcatgtctgttcagcccaaaaactggctacctggaccctgttaccggcagcagcgcgtttctaaaacaaaaacagacaacaacaacagcaactttacctggactggtgcttcaaaatataaccttaatgggcgtgaatctataatcaaccctggcactgctatggcctcacacaaagacgacaaagacaagttctttcccatgagcggtgtcatgatttttggaaaggagagcgccggagcttcaaacactgcattggacaatgtcatgatcacagacgaagaggaaatcaaagccactaaccccgtggccaccgaaagatttgggactgtggcagtcaatctccagagcagcagcacagaccctgcgaccggagatgtgcatgttatgggagccttacctggaatggtgtggcaagacagagacgtatacctgcagggtcctatttgggccaaaattcctcacacggatggacactttcacccgtctcctctcatgggcggctttggacttaagcacccgcctcctcagatcctcatcaaaaacacgcctgttcctgcgaatcctccggcagagttttcggctacaaagtttgcttcattcatcacccagtattccacaggacaagtgagcgtggagattgaatgggagctgcagaaagaaaacagcaaacgctggaatcccgaagtgcagtatacatctaactatgcaaaatctgccaacgttgatttcactgtggacaacaatggactttatactgagcctcgccccattggcacccgttacctcacccgtcccctg

SEQ ID NO: 96 - protein, 736 aa, Adeno-associated virus 6
MAADGYLPDWLEDNLSEGIREWWDLKPGAPKPKANQQKQDDGRGLVLPGYKYLGPFNGLDKGEPVNAADAAALEHDKAYDQQLKAGDNPYLRYNHADAEFQERLQEDTSFGGNLGRAVFQAKKRVLEPFGLVEEGAKTAPGKKRPVEQSPQEPDSSSGIGKTGQQPAKKRLNFGQTGDSESVPDPQPLGEPPATPAAVGPTTMASGGGAPMADNNEGADGVGNASGNWHCDSTWLGDRVITTSTRTWALPTYNNHLYKQISSASTGASNDNHYFGYSTPWGYFDFNRFHCHFSPRDWQRLINNNWGFRPKRLNFKLFNIQVKEVTTNDGVTTIANNLTSTVQVFSDSEYQLPYVLGSAHQGCLPPFPADVFMIPQYGYLTLNNGSQAVGRSSFYCLEYFPSQMLRTGNNFTFSYTFEDVPFHSSYAHSQSLDRLMNPLIDQYLYYLNRTQNQSGSAQNKDLLFSRGSPAGMSVQPKNWLPGPCYRQQRVSKTKTDNNNSNFTWTGASKYNLNGRESIINPGTAMASHKDDKDKFFPMSGVMIFGKESAGASNTALDNVMITDEEEIKATNPVATERFGTVAVNLQSSSTDPATGDVHVMGALPGMVWQDRDVYLQGPIWAKIPHTDGHFHPSPLMGGFGLKHPPPQILIKNTPVPANPPAEFSATKFASFITQYSTGQVSVEIEWELQKENSKRWNPEVQYTSNYAKSANVDFTVDNNGLYTEPRPIGTRYLTRPL

SEQ ID NO: 97 - protein, 623 aa, Adeno-associated virus 6
MPGFYEIVIKVPSDLDEHLPGISDSFVNWVAEKEWELPPDSDMDLNLIEQAPLTVAEKLQRDFLVQWRRVSKAPEALFFVQFEKGESYFHLHILVETTGVKSMVLGRFLSQIRDKLVQTIYRGIEPTLPNWFAVTKTRNGAGGGNKVVDECYIPNYLLPKTQPELQWAWTNMEEYISACLNLAERKRLVAHDLTHVSQTQEQNKENLNPNSDAPVIRSKTSARYMELVGWLVDRGITSEKQWIQEDQASYISFNAASNSRSQIKAALDNAGKIMALTKSAPDYLVGPAPPADIKTNRIYRILELNGYDPAYAGSVFLGWAQKRFGKRNTIWLFGPATTGKTNIAEAIAHAVPFYGCVNWTNENFPFNDCVDKMVIWWEEGKMTAKVVESAKAILGGSKVRVDQKCKSSAQIDPTPVIVTSNTNMCAVIDGNSTTFEHQQPLQDRMFKFELTRRLEHDFGKVTKQEVKEFFRWAQDHVTEVAHEFYVRKGGANKRPAPDDADKSEPKRACPSVADPSTSDAEGAPVDFADRYQNKCSRHAGMLQMLFPCKTCERMNQNFNICFTHGTRDCSECFPGVSESQPVVRKRTYRKLCAIHHLLGRAPEIACSACDLVNVDLDDCVSEQ

SEQ ID NO: 98 - DNA, 4683 bp, Adeno-associated virus 6
ttggccactccctctctgcgcgctcgctcgctcactgaggccgggcgaccaaaggtcgcccgacgcccgggctttgcccgggcggcctcagtgagcgagcgagcgcgcagagagggagtggccaactccatcactaggggttcctggaggggtggagtcgtgacgtgaattacgtcatagggttagggaggtcctgtattagaggtcacgtgagtgttttgcgacattttgcgacaccatgtggtcacgctgggtatttaagcccgagtgagcacgcagggtctccattttgaagcgggaggtttgaacgcgcagcgccatgccggggttttacgagattgtgattaaggtccccagcgaccttgacgagcatctgcccggcatttctgacagctttgtgaactgggtggccgagaaggaatgggagttgccgccagattctgacatggatctgaatctgattgagcaggcacccctgaccgtggccgagaagctgcagcgcgacttcctggtccagtggcgccgcgtgagtaaggccccggaggccctcttctttgttcagttcgagaagggcgagtcctacttccacctccatattctggtggagaccacgggggtcaaatccatggtgctgggccgcttcctgagtcagattagggacaagctggtgcagaccatctaccgcgggatcgagccgaccctgcccaactggttcgcggtgaccaagacgcgtaatggcgccggaggggggaacaaggtggtggacgagtgctacatccccaactacctcctgcccaagactcagcccgagctgcagtgggcgtggactaacatggaggagtatataagcgcgtgtttaaacctggccgagcgcaaacggctcgtggcgcacgacctgacccacgtcagccagacccaggagcagaacaaggagaatctgaaccccaattctgacgcgcctgtcatccggtcaaaaacctccgcacgctacatggagctggtcgggtggctggtggaccggggcatcacctccgagaagcagtggatccaggaggaccaggcctcgtacatctccttcaacgccgcctccaactcgcggtcccagatcaaggccgctctggacaatgccggcaagatcatggcgctgaccaaatccgcgcccgactacctggtaggccccgctccgcccgccgacattaaaaccaaccgcatttaccgcatcctggagctgaacggctacgaccctgcctacgccggctccgtctttctcggctgggcccagaaaaggttcggaaaacgcaacaccatctggctgtttgggccggccaccacgggcaagaccaacatcgcggaagccatcgcccacgccgtgcccttctacggctgcgtcaactggaccaatgagaactttcccttcaacgattgcgtcgacaagatggtgatctggtgggaggagggcaagatgacggccaaggtcgtggagtccgccaaggccattctcggcggcagcaaggtgcgcgtggaccaaaagtgcaagtcgtccgcccagatcgatcccacccccgtgatcgtcacctccaacaccaacatgtgcgccgtgattgacgggaacagcaccaccttcgagcaccagcagccgttgcaggaccggatgttcaaatttgaactcacccgccgtctggagcatgactttggcaaggtgacaaagcaggaagtcaaagagttcttccgctgggcgcaggatcacgtgaccgaggtggcgcatgagttctacgtcagaaagggtggagccaacaagagacccgcccccgatgacgcggataaaagcgagcccaagcgggcctgcccctcagtcgcggatccatcgacgtcagacgcggaaggagctccggtggactttgccgacaggtaccaaaacaaatgttctcgtcacgcgggcatgcttcagatgctgtttccctgcaaaacatgcgagagaatgaatcagaatttcaacatttgcttcacgcacgggaccagagactgttcagaatgtttccccggcgtgtcagaatctcaaccggtcgtcagaaagaggacgtatcggaaactctgtgccattcatcatctgctggggcgggctcccgagattgcttgctcggcctgcgatctggtcaacgtggatctggatgactgtgtttctgagcaataaatgacttaaaccaggtatggctgccgatggttatcttccagattggctcgaggacaacctctctgagggcattcgcgagtggtgggacttgaaacctggagccccgaaacccaaagccaaccagcaaaagcaggacgacggccggggtctggtgcttcctggctacaagtacctcggacccttcaacggactcgacaagggggagcccgtcaacgcggcggatgcagcggccctcgagcacgacaaggcctacgaccagcagctcaaagcgggtgacaatccgtacctgcggtataaccacgccgacgccgagtttcaggagcgtctgcaagaagatacgtcttttgggggcaacctcgggcgagcagtcttccaggccaagaagagggttctcgaaccttttggtctggttgaggaaggtgctaagacggctcctggaaagaaacgtccggtagagcagtcgccacaagagccagactcctcctcgggcattggcaagacaggccagcagcccgctaaaaagagactcaattttggtcagactggcgactcagagtcagtccccgacccacaacctctcggagaacctccagcaacccccgctgctgtgggacctactacaatggcttcaggcggtggcgcaccaatggcagacaataacgaaggcgccgacggagtgggtaatgcctcaggaaattggcattgcgattccacatggctgggcgacagagtcatcaccaccagcacccgaacatgggccttgcccacctataacaaccacctctacaagcaaatctccagtgcttcaacgggggccagcaacgacaaccactacttcggctacagcaccccctgggggtattttgatttcaacagattccactgccatttctcaccacgtgactggcagcgactcatcaacaacaattggggattccggcccaagagactcaacttcaagctcttcaacatccaagtcaaggaggtcacgacgaatgatggcgtcacgaccatcgctaataaccttaccagcacggttcaagtcttctcggactcggagtaccagttgccgtacgtcctcggctctgcgcaccagggctgcctccctccgttcccggcggacgtgttcatgattccgcagtacggctacctaacgctcaacaatggcagccaggcagtgggacggtcatccttttactgcctggaatatttcccatcgcagatgctgagaacgggcaataactttaccttcagctacaccttcgaggacgtgcctttccacagcagctacgcgcacagccagagcctggaccggctgatgaatcctctcatcgaccagtacctgtattacctgaacagaactcagaatcagtccggaagtgcccaaaacaaggacttgctgtttagccgggggtctccagctggcatgtctgttcagcccaaaaactggctacctggaccctgttaccggcagcagcgcgtttctaaaacaaaaacagacaacaacaacagcaactttacctggactggtgcttcaaaatataaccttaatgggcgtgaatctataatcaaccctggcactgctatggcctcacacaaagacgacaaagacaagttctttcccatgagcggtgtcatgatttttggaaaggagagcgccggagcttcaaacactgcattggacaatgtcatgatcacagacgaagaggaaatcaaagccactaaccccgtggccaccgaaagatttgggactgtggcagtcaatctccagagcagcagcacagaccctgcgaccggagatgtgcatgttatgggagccttacctggaatggtgtggcaagacagagacgtatacctgcagggtcctatttgggccaaaattcctcacacggatggacactttcacccgtctcctctcatgggcggctttggacttaagcacccgcctcctcagatcctcatcaaaaacacgcctgttcctgcgaatcctccggcagagttttcggctacaaagtttgcttcattcatcacccagtattccacaggacaagtgagcgtggagattgaatgggagctgcagaaagaaaacagcaaacgctggaatcccgaagtgcagtatacatctaactatgcaaaatctgccaacgttgatttcactgtggacaacaatggactttatactgagcctcgccccattggcacccgttacctcacccgtcccctgtaattgtgtgttaatcaataaaccggttaattcgtgtcagttgaactttggtctcatgtcgttattatcttatctggtcaccatagcaaccggttacacattaactgcttagttgcgcttcgcgaatacccctagtgatggagttgcccactccctctatgcgcgctcgctcgctcggtggggccggcagagcagagctctgccgtctgcggacctttggtccgcaggccccaccgagcgagcgagcgcgcatagagggagtgggcaa

SEQ ID NO: 99 - DNA, 2211 bp, Adeno-associated virus
atggctgccgatggttatcttccagattggctcgaggacaacctctctgagggcattcgcgagtggtgggacttgaaacctggagccccgaaacccaaagccaaccagcaaaagcaggacgacggccggggtctggtgcttcctggctacaagtacctcggacccttcaacggactcgacaagggggagcccgtcaacgcggcggatgcagcggccctcgagcacgacaaggcctacgaccagcagctcaaagcgggtgacaatccgtacctgcggtataaccacgccgacgccgagtttcaggagcgtctgcaagaagatacgtcttttgggggcaacctcgggcgagcagtcttccaggccaagaagagggttctcgaaccttttggtctggttgaggaaggtgctaagacggctcctggaaagaaacgtccggtagagcagtcgccacaagagccagactcctcctcgggcattggcaagacaggccagcagcccgctaaaaagagactcaattttggtcagactggcgactcagagtcagtccccgacccacaacctctcggagaacctccagcaacccccgctgctgtgggacctactacaatggcttcaggcggtggcgcaccaatggcagacaataacgaaggcgccgacggagtgggtaatgcctcaggaaattggcattgcgattccacatggctgggcgacagagtcatcaccaccagcacccgaacatgggccttgcccacctataacaaccacctctacaagcaaatctccagtgcttcaacgggggccagcaacgacaaccactacttcggctacagcaccccctgggggtattttgatttcaacagattccactgccatttctcaccacgtgactggcagcgactcatcaacaacaattggggattccggcccaagagactcaacttcaagctcttcaacatccaagtcaaggaggtcacgacgaatgatggcgtcacgaccatcgctaataaccttaccagcacggttcaagtcttctcggactcggagtaccagttgccgtacgtcctcggctctgcgcaccagggctgcctccctccgttcccggcggacgtgttcatgattccgcagtacggctacctaacgctcaacaatggcagccaggcagtgggacggtcatccttttactgcctggaatatttcccatcgcagatgctgagaacgggcaataactttaccttcagctacaccttcgaggacgtgcctttccacagcagctacgcgcacagccagagcctggaccggctgatgaatcctctcatcgaccagtacctgtattacctgaacagaactcagaatcagtccggaagtgcccaaaacaaggacttgctgtttagccgggggtctccagctggcatgtctgttcagcccaaaaactggctacctggaccctgttaccggcagcagcgcgtttctaaaacaaaaacagacaacaacaacagcaactttacctggactggtgcttcaaaatataaccttaatgggcgtgaatctataatcaaccctggcactgctatggcctcacacaaagacgacaaagacaagttctttcccatgagcggtgtcatgatttttggaaaggagagcgccggagcttcaaacactgcattggacaatgtcatgatcacagacgaagaggaaatcaaagccactaaccccgtggccaccgaaagatttgggactgtggcagtcaatctccagagcagcagcacagaccctgcgaccggagatgtgcatgttatgggagccttacctggaatggtgtggcaagacagagacgtatacctgcagggtcctatttgggccaaaattcctcacacggatggacactttcacccgtctcctctcatgggcggctttggacttaagcacccgcctcctcagatcctcatcaaaaacacgcctgttcctgcgaatcctccggcagagttttcggctacaaagtttgcttcattcatcacccagtattccacaggacaagtgagcgtggagattgaatgggagctgcagaaagaaaacagcaaacgctggaatcccgaagtgcagtatacatctaactatgcaaaatctgccaacgttgatttcactgtggacaacaatggactttatactgagcctcgccccattggcacccgttacctcacccgtcccctgtaa

SEQ ID NO: 100 - protein, 736 aa, Adeno-associated virus; identical to SEQ ID NO: 96

SEQ ID NO: 101 - protein, 736 aa, Adeno-associated virus
MAADGYLPDWLEDNLSEGIREWWDLKPGAPKPKANQQKQDDGRGLVLPGYKYLGPFNGLDKGEPVNAADAAALEHDKAYDQQLKAGDNPYLRYNHADAEFQERLQEDTSFGGNLGRAVFQAKKRVLEPFGLVEEGAKTAPGKKRPVEQSPQEPDSSSGIGKTGQQPAKKRLNFGQTGDSESVPDPQPLGEPPATPAAVGPTTMASGGGAPMADNNEGADGVGNASGNWHCDSTWLGDRVITTSTRTWALPTYNNHLYKQISSASTGASNDNHYFGYSTPWGYFDFNRFHCHFSPRDWQRLINNNWGFRPKRLNFKLFNIQVKEVTTNDGVTTIANNLTSTVQVFSDSEYQLPYVLGSAHQGCLPPFPADVFMIPQYGYLTLNNGSQAVGRSSFYCLEYFPSQMLRTGNNFTFSYTFEDVPFHSSYAHSQSLDRLMNPLIDQYLYYLNRTQNQSGSAQNKDLLFSRGSPAGMSVQPKNWLPGPCYRQQRVSKTKTDNNNSNFTWTGASKYNLNGRESIINPGTAMASHKDDEDKFFPMSGVMIFGKESAGASNTALDNVMITDEEEIKATNPVATERFGTVAVNLQSSSTDPATGDVHVMGALPGMVWQDRDVYLQGPIWAKIPHTDGHFHPSPLMGGFGLKHPPPQILIKNTPVPANPPAEFSATKFASFITQYSTGQVSVEIEWELQKENSKRWNPEVQYTSNYAKSANVDFTVDNNGLYTEPRPIGTRYLTRPL

SEQ ID NO: 102 - protein, 736 aa, Adeno-associated virus
MAADGYLPDWLEDNLSEGIREWWDLKPGAPKPKANQQKQDDGRGLVLPGYKYLGPFNGLDKGEPVNAADAAALEHDKAYDQQLKAGDNPYLRYNHADAEFQERLQEDTSFGGNLGRAVFQAKKRVLEPLGLVEEGAKTAPGKKRPVEQSPQEPDSSSGIGKTGQQPAKKRLNFGQTGDSESVPDPQPLGEPPATPAAVGPTTMASGGGAPMADNNEGADGVGNASGNWHCDSTWLGDRVITTSTRTWALPTYNNHLYKQISSASTGASNDNHYFGYSTPWGYFDFNRFHCHFSPRDWQRLINNNWGFRPKRLNFKLFNIQVKEVTTNDGVTTIANNLTSTVQVFSDSEYQLPYVLGSAHQGCLPPFPADVFMIPQYGYLTLNNGSQAVGRSSFYCLEYFPSQMLRTGNNFTFSYTFEDVPFHSSYAHSQSLDRLMNPLIDQYLYYLNRTQNQSGSAQNKDLLFSRGSPAGMSVQPKNWLPGPCYRQQRVSKTKTDNNNSNFTWTGASKYNLNGRESIINPGTAMASHKDDEDKFFPMSGVMIFGKESAGASNTALDNVMITDEEEIKATNPVATERFGTVAVNLQSSSTDPATGDVHVMGALPGMVWQDRDVYLQGPIWAKIPHTDGHFHPSPLMGGFGLKHPPPQILIKNTPVPANPPAEFSATKFASFITQYSTGQVSVEIEWELQKENSKRWNPEVQYTSNYAKSANVDFTVDNNGLYTEPRPIGTRYLTRPL

SEQ ID NO: 103 - protein, 736 aa, Adeno-associated virus
MAADGYLPDWLEDNLSEGIREWWDLKPGAPKPKANQQKQDDGRGLVLPGYKYLGPFNGLDKGEPVNAADAAALEHDKAYDQQLKAGDNPYLRYNHADAEFQERLQEDTSFGGNLGRAVFQAKKRVLEPLGLVEEGAKTAPGKKRPVEQSPQEPDSSSGIGKTGQQPAKKRLNFGQTGDSESVPDPQPLGEPPATPAAVGPTTMASGGGAPMADNNEGADGVGNASGNWHCDSTWLGDRVITTSTRTWALPTYNNHLYKQISSASTGASNDNHYFGYSTPWGYFDFNRFHCHFSPRDWQRLINNNWGFRPKRLNFKLFNIQVKEVTTNDGVTTIANNLTSTVQVFSDSEYQLPYVLGSAHQGCLPPFPADVFMIPQYGYLTLNNGSQAVGRSSFYCLEYFPSQMLRTGNNFTFSYTFEDVPFHSSYAHSQSLDRLMNPLIDQYLYYLNRTQNQSGSAQNKDLLFSRGSPAGMSVQPKNWLPGPCYRQQRVSKTKTDNNNSNFTWTGASKYNLNGRESIINPGTAMASHKDDKDKFFPMSGVMIFGKESAGASNTALDNVMITDEEEIKATNPVATERFGTVAVNLQSSSTDPATGDVHVMGALPGMVWQDRDVYLQGPIWAKIPHTDGHFHPSPLMGGFGLKHPPPQILIKNTPVPANPPAEFSATKFASFITQYSTGQVSVEIEWELQKENSKRWNPEVQYTSNYAKSANVDFTVDNNGLYTEPRPIGTRYLTRPL

SEQ ID NO: 104 - DNA, 2214 bp, Adeno-associated virus
atggctgccgatggttatcttccagattggctcgaggacaacctctctgagggcattcgcgagtggtgggacctgaaacctggagccccgaaacccaaagccaaccagcaaaagcaggacaacggccggggtctggtgcttcctggctacaagtacctcggacccttcaacggactcgacaagggggagcccgtcaacgcggcggacgcagcggccctcgagcacgacaaggcctacgaccagcagctcaaagcgggtgacaatccgtacctgcggtataaccacgccgacgccgagtttcaggagcgtctgcaagaagatacgtcatttgggggcaacctcgggcgagcagtcttccaggccaagaagcgggttctcgaacctctcggtctggttgaggaaggcgctaagacggctcctgcaaagaagagaccggtagagccgtcacctcagcgttcccccgactcctccacgggcatcggcaagaaaggccagcagcccgccagaaagagactcaatttcggtcagactggcgactcagagtcagtccccgaccctcaacctctcggagaacctccagcagcgccctctagtgtgggatctggtacagtggctgcaggcggtggcgcaccaatggcagacaataacgaaggtgccgacggagtgggtaatgcctcaggaaattggcattgcgattccacatggctgggcgacagagtcattaccaccagcacccgaacctgggccctgcccacctacaacaaccacctctacaagcaaatctccagtgaaactgcaggtagtaccaacgacaacacctacttcggctacagcaccccctgggggtattttgactttaacagattccactgccacttctcaccacgtgactggcagcgactcatcaacaacaactggggattccggcccaagaagctgcggttcaagctcttcaacatccaggtcaaggaggtcacgacgaatgacggcgttacgaccatcgctaataaccttaccagcacgattcaggtattctcggactcggaataccagctgccgtacgtcctcggctctgcgcaccagggctgcctgcctccgttcccggcggacgtcttcatgattcctcagtacggctacctgactctcaacaatggcagtcagtctgtgggacgttcctccttctactgcctggagtacttcccctctcagatgctgagaacgggcaacaactttgagttcagctacagcttcgaggacgtgcctttccacagcagctacgcacacagccagagcctggaccggctgatgaatcccctcatcgaccagtacttgtactacctggccagaacacagagtaacccaggaggcacagctggcaatcgggaactgcagttttaccagggcgggccttcaactatggccgaacaagccaagaattggttacctggaccttgcttccggcaacaaagagtctccaaaacgctggatcaaaacaacaacagcaactttgcttggactggtgccaccaaatatcacctgaacggcagaaactcgttggttaatcccggcgtcgccatggcaactcacaaggacgacgaggaccgctttttcccatccagcggagtcctgatttttggaaaaactggagcaactaacaaaactacattggaaaatgtgttaatgacaaatgaagaagaaattcgtcctactaatcctgtagccacggaagaatacgggatagtcagcagcaacttacaagcggctaatactgcagcccagacacaagttgtcaacaaccagggagccttacctggcatggtctggcagaaccgggacgtgtacctgcagggtcccatctgggccaagattcctcacacggatggcaactttcacccgtctcctttgatgggcggctttggacttaaacatccgcctcctcagatcctgatcaagaacactcccgttcccgctaatcctccggaggtgtttactcctgccaagtttgcttcgttcatcacacagtacagcaccggacaagtcagcgtggaaatcgagtgggagctgcagaaggaaaacagcaagcgctggaacccggagattcagtacacctccaactttgaaaagcagactggtgtggactttgccgttgacagccagggtgtttactctgagcctcgccctattggcactcgttacctcacccgtaatctgtaa

SEQ ID NO: 105 - protein, 738 aa, Adeno-associated virus
MAADGYLPDWLEDNLSEGIREWWALKPGAPKPKANQQKQDDGRGLVLPGYKYLGPFNGLDKGEPVNAADAAALEHDKAYDQQLQAGDNPYLRYNHADAEFQERLQEDTSFGGNLGRAVFQAKKRVLEPLGLVEEGAKTAPGKKRPVEPSPQRSPDSSTGIGKKGQQPARKRLNFGQTGDSESVPDPQPLGEPPAAPSGVGPNTMAAGGGAPMADNNEGADGVGSSSGNWHCDSTWLGDRVITTSTRTWALPTYNNHLYKQISNGTSGGATNDNTYFGYSTPWGYFDFNRFHCHFSPRDWQRLINNNWGFRPKRLSFKLFNIQVKEVTQNEGTKTIANNLTSTIQVFTDSEYQLPYVLGSAHQGCLPPFPADVFMIPQYGYLTLNNGSQAVGRSSFYCLEYFPSQMLRTGNNFQFTYTFEDVPFHSSYAHSQSLDRLMNPLIDQYLYYLSRTQTTGGTANTQTLGFSQGGPNTMANQAKNWLPGPCYRQQRVSTTTGQNNNSNFAWTAGTKYHLNGRNSLANPGIAMATHKDDEERFFPSNGILIFGKQNAARDNADYSDVMLTSEEEIKTTNPVATEEYGIVADNLQQQNTAPQIGTVNSQGALPGMVWQNRDVYLQGPIWAKIPHTDGNFHPSPLMGGFGLKHPPPQILIKNTPVPADPPTTFNQSKLNSFITQYSTGQVSVEIEWELQKENSKRWNPEIQYTSNYYKSTSVDFAVNTEGVYSEPRPIGTRYLTRNL

SEQ ID NO: 106 - protein, 737 aa, Adeno-associated virus 7
MAADGYLPDWLEDNLSEGIREWWDLKPGAPKPKANQQKQDNGRGLVLPGYKYLGPFNGLDKGEPVNAADAAALEHDKAYDQQLKAGDNPYLRYNHADAEFQERLQEDTSFGGNLGRAVFQAKKRVLEPLGLVEEGAKTAPAKKRPVEPSPQRSPDSSTGIGKKGQQPARKRLNFGQTGDSESVPDPQPLGEPPAAPSSVGSGTVAAGGGAPMADNNEGADGVGNASGNWHCDSTWLGDRVITTSTRTWALPTYNNHLYKQISSETAGSTNDNTYFGYSTPWGYFDFNRFHCHFSPRDWQRLINNNWGFRPKKLRFKLFNIQVKEVTTNDGVTTIANNLTSTIQVFSDSEYQLPYVLGSAHQGCLPPFPADVFMIPQYGYLTLNNGSQSVGRSSFYCLEYFPSQMLRTGNNFEFSYSFEDVPFHSSYAHSQSLDRLMNPLIDQYLYYLARTQSNPGGTAGNRELQFYQGGPSTMAEQAKNWLPGPCFRQQRVSKTLDQNNNSNFAWTGATKYHLNGRNSLVNPGVAMATHKDDEDRFFPSSGVLIFGKTGATNKTTLENVLMTNEEEIRPTNPVATEEYGIVSSNLQAANTAAQTQVVNNQGALPGMVWQNRDVYLQGPIWAKIPHTDGNFHPSPLMGGFGLKHPPPQILIKNTPVPANPPEVFTPAKFASFITQYSTGQVSVEIEWELQKENSKRWNPEIQYTSNFEKQTGVDFAVDSQGVYSEPRPIGTRYLTRNL

SEQ ID NO: 107 - protein, 623 aa, Artificial Sequence
  Description of Artificial Sequence: Synthetic polypeptide
MPGFYEIVIKVPSDLDEHLPGISDSFVNWVAEKEWELPPDSDMDLNLIEQAPLTVAEKLQRDFLVQWRRVSKAPEALFFVQFEKGESYFHLHVLVETTGVKSMVLGRFLSQIREKLVQTIYRGVEPTLPNWFAVTKTRNGAGGGNKVVDECYIPNYLLPKTQPELQWAWTNMEEYISACLNLAERKRLVAQHLTHVSQTQEQNKENLNPNSDAPVIRSKTSARYMELVGWLVDRGITSEKQWIQEDQASYISFNAASNSRSQIKAALDNAGKIMALTKSAPDYLVGPSLPADIKTNRIYRILELNGYDPAYAGSVFLGWAQKKFGKRNTIWLFGPATTGKTNIAEAIAHAVPFYGCVNWTNENFPFNDCVDKMVIWWEEGKMTAKVVESAKAILGGSKVRVDQKCKSSAQIDPTPVIVTSNTNMCAVIDGNSTTFEHQQPLQDRMFKFELTRRLEHDFGKVTKQEVKEFFRWASDHVTEVAHEFYVRKGGASKRPAPDDADISEPKRACPSVADPSTSDAEGAPVDFADRYQNKCSRHAGMIQMLFPCKTCERMNQNFNICFTHGVRDCLECFPGVSESQPVVRKKTYRKLCAIHHLLGRAPEIACSACDLVNVDLDDCVSEQ

SEQ ID NO: 108 - DNA, 4721 bp, Adeno-associated virus 7
ttggccactccctctatgcgcgctcgctcgctcggtggggcctgcggaccaaaggtccgcagacggcagagctctgctctgccggccccaccgagcgagcgagcgcgcatagagggagtggccaactccatcactaggggtaccgcgaagcgcctcccacgctgccgcgtcagcgctgacgtaaatcacgtcataggggagtggtcctgtattagctgtcacgtgagtgcttttgcgacattttgcgacaccacgtggccatttgaggtatatatggccgagtgagcgagcaggatctccattttgaccgcgaaatttgaacgagcagcagccatgccgggtttctacgagatcgtgatcaaggtgccgagcgacctggacgagcacctgccgggcatttctgactcgtttgtgaactgggtggccgagaaggaatgggagctgcccccggattctgacatggatctgaatctgatcgagcaggcacccctgaccgtggccgagaagctgcagcgcgacttcctggtccaatggcgccgcgtgagtaaggccccggaggccctgttctttgttcagttcgagaagggcgagagctacttccaccttcacgttctggtggagaccacgggggtcaagtccatggtgctaggccgcttcctgagtcagattcgggagaagctggtccagaccatctaccgcggggtcgagcccacgctgcccaactggttcgcggtgaccaagacgcgtaatggcgccggcggggggaacaaggtggtggacgagtgctacatccccaactacctcctgcccaagacccagcccgagctgcagtgggcgtggactaacatggaggagtatataagcgcgtgtttgaacctggccgaacgcaaacggctcgtggcgcagcacctgacccacgtcagccagacgcaggagcagaacaaggagaatctgaaccccaattctgacgcgcccgtgatcaggtcaaaaacctccgcgcgctacatggagctggtcgggtggctggtggaccggggcatcacctccgagaagcagtggatccaggaggaccaggcctcgtacatctccttcaacgccgcctccaactcgcggtcccagatcaaggccgcgctggacaatgccggcaagatcatggcgctgaccaaatccgcgcccgactacctggtggggccctcgctgcccgcggacattaaaaccaaccgcatctaccgcatcctggagctgaacgggtacgatcctgcctacgccggctccgtctttctcggctgggcccagaaaaagttcgggaagcgcaacaccatctggctgtttgggcccgccaccaccggcaagaccaacattgcggaagccatcgcccacgccgtgcccttctacggctgcgtcaactggaccaatgagaactttcccttcaacgattgcgtcgacaagatggtgatctggtgggaggagggcaagatgacggccaaggtcgtggagtccgccaaggccattctcggcggcagcaaggtgcgcgtggaccaaaagtgcaagtcgtccgcccagatcgaccccacccccgtgatcgtcacctccaacaccaacatgtgcgccgtgattgacgggaacagcaccaccttcgagcaccagcagccgttgcaggaccggatgttcaaatttgaactcacccgccgtctggagcacgactttggcaaggtgacgaagcaggaagtcaaagagttcttccgctgggccagtgatcacgtgaccgaggtggcgcatgagttctacgtcagaaagggcggagccagcaaaagacccgcccccgatgacgcggatataagcgagcccaagcgggcctgcccctcagtcgcggatccatcgacgtcagacgcggaaggagctccggtggactttgccgacaggtaccaaaacaaatgttctcgtcacgcgggcatgattcagatgctgtttccctgcaaaacgtgcgagagaatgaatcagaatttcaacatttgcttcacacacggggtcagagactgtttagagtgtttccccggcgtgtcagaatctcaaccggtcgtcagaaaaaagacgtatcggaaactctgcgcgattcatcatctgctggggcgggcgcccgagattgcttgctcggcctgcgacctggtcaacgtggacctggacgactgcgtttctgagcaataaatgacttaaaccaggtatggctgccgatggttatcttccagattggctcgaggacaacctctctgagggcattcgcgagtggtgggacctgaaacctggagccccgaaacccaaagccaaccagcaaaagcaggacaacggccggggtctggtgcttcctggctacaagtacctcggacccttcaacggactcgacaagggggagcccgtcaacgcggcggacgcagcggccctcgagcacgacaaggcctacgaccagcagctcaaagcgggtgacaatccgtacctgcggtataaccacgccgacgccgagtttcaggagcgtctgcaagaagatacgtcatttgggggcaacctcgggcgagcagtcttccaggccaagaagcgggttctcgaacctctcggtctggttgaggaaggcgctaagacggctcctgcaaagaagagaccggtagagccgtcacctcagcgttcccccgactcctccacgggcatcggcaagaaaggccagcagcccgccagaaagagactcaatttcggtcagactggcgactcagagtcagtccccgaccctcaacctctcggagaacctccagcagcgccctctagtgtgggatctggtacagtggctgcaggcggtggcgcaccaatggcagacaataacgaaggtgccgacggagtgggtaatgcctcaggaaattggcattgcgattccacatggctgggcgacagagtcattaccaccagcacccgaacctgggccctgcccacctacaacaaccacctctacaagcaaatctccagtgaaactgcaggtagtaccaacgacaacacctacttcggctacagcaccccctgggggtattttgactttaacagattccactgccacttctcaccacgtgactggcagcgactcatcaacaacaactggggattccggcccaagaagctgcggttcaagctcttcaacatccaggtcaaggaggtcacgacgaatgacggcgttacgaccatcgctaataaccttaccagcacgattcaggtattctcggactcggaataccagctgccgtacgtcctcggctctgcgcaccagggctgcctgcctccgttcccggcggacgtcttcatgattcctcagtacggctacctgactctcaacaatggcagtcagtctgtgggacgttcctccttctactgcctggagtacttcccctctcagatgctgagaacgggcaacaactttgagttcagctacagcttcgaggacgtgcctttccacagcagctacgcacacagccagagcctggaccggctgatgaatcccctcatcgaccagtacttgtactacctggccagaacacagagtaacccaggaggcacagctggcaatcgggaactgcagttttaccagggcgggccttcaactatggccgaacaagccaagaattggttacctggaccttgcttccggcaacaaagagtctccaaaacgctggatcaaaacaacaacagcaactttgcttggactggtgccaccaaatatcacctgaacggcagaaactcgttggttaatcccggcgtcgccatggcaactcacaaggacgacgaggaccgctttttcccatccagcggagtcctgatttttggaaaaactggagcaactaacaaaactacattggaaaatgtgttaatgacaaatgaagaagaaattcgtcctactaatcctgtagccacggaagaatacgggatagtcagcagcaacttacaagcggctaatactgcagcccagacacaagttgtcaacaaccagggagccttacctggcatggtctggcagaaccgggacgtgtacctgcagggtcccatctgggccaagattcctcacacggatggcaactttcacccgtctcctttgatgggcggctttggacttaaacatccgcctcctcagatcctgatcaagaacactcccgttcccgctaatcctccggaggtgtttactcctgccaagtttgcttcgttcatcacacagtacagcaccggacaagtcagcgtggaaatcgagtgggagctgcagaaggaaaacagcaagcgctggaacccggagattcagtacacctccaactttgaaaagcagactggtgtggactttgccgttgacagccagggtgtttactctgagcctcgccctattggcactcgttacctcacccgtaatctgtaattgcatgttaatcaataaaccggttgattcgtttcagttgaactttggtctcctgtgcttcttatcttatcggtttccatagcaactggttacacattaactgcttgggtgcgcttcacgataagaacactgacgtcaccgcggtacccctagtgatggagttggccactccctctatgcgcgctcgctcgctcggtggggcctgcggaccaaaggtccgcagacggcagagctctgctctgccggccccaccgagcgagcgagcgcgcatagagggagtggccaa

SEQ ID NO: 109 - DNA, 2214 bp, Adeno-associated virus; identical to SEQ ID NO: 104

SEQ ID NO: 110 - protein, 737 aa, Adeno-associated virus; identical to SEQ ID NO: 106

SEQ ID NO: 111 - DNA, 2217 bp, Adeno-associated virus
atggctgccgatggttatcttccagattggctcgaggacaacctctctgagggcattcgcgagtggtgggcgctgaaacctggagccccgaagcccaaagccaaccagcaaaagcaggacgacggccggggtctggtgcttcctggctacaagtacctcggacccttcaacggactcgacaagggggagcccgtcaacgcggcggacgcagcggccctcgagcacgacaaggcctacgaccagcagctgcaggcgggtgacaatccgtacctgcggtataaccacgccgacgccgagtttcaggagcgtctgcaagaagatacgtcttttgggggcaacctcgggcgagcagtcttccaggccaagaagcgggttctcgaacctctcggtctggttgaggaaggcgctaagacggctcctggaaagaagagaccggtagagccatcaccccagcgttctccagactcctctacgggcatcggcaagaaaggccaacagcccgccagaaaaagactcaattttggtcagactggcgactcagagtcagttccagaccctcaacctctcggagaacctccagcagcgccctctggtgtgggacctaatacaatggctgcaggcggtggcgcaccaatggcagacaataacgaaggcgccgacggagtgggtagttcctcgggaaattggcattgcgattccacatggctgggcgacagagtcatcaccaccagcacccgaacctgggccctgcccacctacaacaaccacctctacaagcaaatctccaacgggacatcgggaggagccaccaacgacaacacctacttcggctacagcaccccctgggggtattttgactttaacagattccactgccacttttcaccacgtgactggcagcgactcatcaacaacaactggggattccggcccaagagactcagcttcaagctcttcaacatccaggtcaaggaggtcacgcagaatgaaggcaccaagaccatcgccaataacctcaccagcaccatccaggtgtttacggactcggagtaccagctgccgtacgttctcggctctgcccaccagggctgcctgcctccgttcccggcggacgtgttcatgattccccagtacggctacctaacactcaacaacggtagtcaggccgtgggacgctcctccttctactgcctggaatactttccttcgcagatgctgagaaccggcaacaacttccagtttacttacaccttcgaggacgtgcctttccacagcagctacgcccacagccagagcttggaccggctgatgaatcctctgattgaccagtacctgtactacttgtctcggactcaaacaacaggaggcacggcaaatacgcagactctgggcttcagccaaggtgggcctaatacaatggccaatcaggcaaagaactggctgccaggaccctgttaccgccaacaacgcgtctcaacgacaaccgggcaaaacaacaatagcaactttgcctggactgctgggaccaaataccatctgaatggaagaaattcattggctaatcctggcatcgctatggcaacacacaaagacgacgaggagcgtttttttcccagtaacgggatcctgatttttggcaaacaaaatgctgccagagacaatgcggattacagcgatgtcatgctcaccagcgaggaagaaatcaaaaccactaaccctgtggctacagaggaatacggtatcgtggcagataacttgcagcagcaaaacacggctcctcaaattggaactgtcaacagccagggggccttacccggtatggtctggcagaaccgggacgtgtacctgcagggtcccatctgggccaagattcctcacacggacggcaacttccacccgtctccgctgatgggcggctttggcctgaaacatcctccgcctcagatcctgatcaagaacacgcctgtacctgcggatcctccgaccaccttcaaccagtcaaagctgaactctttcatcacgcaatacagcaccggacaggtcagcgtggaaattgaatgggagctgcagaaggaaaacagcaagcgctggaaccccgagatccagtacacctccaactactacaaatctacaagtgtggactttgctgttaatacagaaggcgtgtactctgaaccccgccccattggcacccgttacctcacccgtaatctgtaa

SEQ ID NO: 112 - DNA, 2213 bp, Adeno-associated virus 8
atggctgccgatggttatcttccagattggctcgaggacaacctctctgagggcattcgcgagtggtgggcgctgaaacctggagccccgaagcccaaagccaaccagcaaaagcaggacgacggccggggtctggtgcttcctggctacaagtacctcggacccttcaacggactcgacaagggggagcccgtcaacgcggcggacgcagcggccctcgagcacgacaaggcctacgaccagcagctgcaggcgggtgacaatccgtacctgcggtataaccacgccgacgccgagtttcaggagcgtctgcaagaagatacgtcttttgggggcaacctcgggcgagcagtcttccaggccaagaagcgggttctcgaacctctcggtctggttgaggaaggcgctaagacggctcctggaaagaagagaccggtagagccatcaccccagcgttctccagactcctctacgggcatcggcaagaaaggccaacagcccgccagaaaaagactcaattttggtcagactggcgactcagagtcagttccagaccctcaacctctcggagaacctccagcagcgccctctggtgtgggacctaatacaatggctgcaggcggtggcgcaccaatggcagacaataacgaaggcgccgacggagtgggtagttcctcgggaaattggcattgcgattccacatggctgggcgacagagtcatcaccaccagcacccgaacctgggccctgcccacctacaacaaccacctctacaagcaaatctccaacgggacatcgggaggagccaccaacgacaacacctacttcggctacagcaccccctgggggtattttgactttaacagattccactgccacttttcaccacgtgactggcagcgactcatcaacaacaactggggattccggcccaagagactcagcttcaagctcttcaacatccaggtcaaggaggtcacgcagaatgaaggcaccaagaccatcgccaataacctcaccagcaccatccaggtgtttacggactcggagtaccagctgccgtacgttctcggctctgcccaccagggctgcctgcctccgttcccggcggacgtgttcatgattccccagtacggctacctaacactcaacaacggtagtcaggccgtgggacgctcctccttctactgcctggaatactttccttcgcagatgctgagaaccggcaacaacttccagtttacttacaccttcgaggacgtgcctttccacagcagctacgcccacagccagagcttggaccggctgatgaatcctctgattgaccagtacctgtactacttgtctcggactcaaacaacaggaggcacggcaaatacgcagactctgggcttcagccaaggtgggcctaatacaatggccaatcaggcaaagaactggctgccaggaccctgttaccgccaacaacgcgtctcaacgacaaccgggcaaaacaacaatagcaactttgcctggactgctgggaccaaataccatctgaatggaagaaattcattggctaatcctggcatcgctatggcaacacacaaagacgacgaggagcgtttttttcccagtaacgggatcctgatttttggcaaacaaaatgctgccagagacaatgcggattacagcgatgtcatgctcaccagcgaggaagaaatcaaaaccactaaccctgtggctacagaggaatacggtatcgtggcagataacttgcagcagcaaaacacggctcctcaaattggaactgtcaacagccagggggccttacccggtatggtctggcagaaccgggacgtgtacctgcagggtcccatctgggccaagattcctcacacggacggcaacttccacccgtctccgctgatgggcggctttggcctgaaacatcctccgcctcagatcctgatcaagaacacgcctgtacctgcggatcctccgaccaccttcaaccagtcaaagctgaactctttcatcacgcaatacagcaccggacaggtcagcgtggaaattgaatgggagctgcagaaggaaaacagcaagcgctggaaccccgagatccagtacacctccaactactacaaatctacaagtgtggactttgctgtaatacagaaggcgtgtactctgaaccccgccccattggcacccgttacctcacccgtaatctg

SEQ ID NO: 113 - DNA, 4393 bp, Adeno-associated virus 8
cagagagggagtggccaactccatcactaggggtagcgcgaagcgcctcccacgctgccgcgtcagcgctgacgtaaattacgtcataggggagtggtcctgtattagctgtcacgtgagtgcttttgcggcattttgcgacaccacgtggccatttgaggtatatatggccgagtgagcgagcaggatctccattttgaccgcgaaatttgaacgagcagcagccatgccgggcttctacgagatcgtgatcaaggtgccgagcgacctggacgagcacctgccgggcatttctgactcgtttgtgaactgggtggccgagaaggaatgggagctgcccccggattctgacatggatcggaatctgatcgagcaggcacccctgaccgtggccgagaagctgcagcgcgacttcctggtccaatggcgccgcgtgagtaaggccccggaggccctcttctttgttcagttcgagaagggcgagagctactttcacctgcacgttctggtcgagaccacgggggtcaagtccatggtgctaggccgcttcctgagtcagattcgggaaaagcttggtccagaccatctacccgcggggtcgagccccaccttgcccaactggttcgcggtgaccaaagacgcggtaatggcgccggcgggggggaacaaggtggtggacgagtgctacatccccaactacctcctgcccaagactcagcccgagctgcagtgggcgtggactaacatggaggagtatataagcgcgtgcttgaacctggccgagcgcaaacggctcgtggcgcagcacctgacccacgtcagccagacgcaggagcagaacaaggagaatctgaaccccaattctgacgcgcccgtgatcaggtcaaaaacctccgcgcgctatatggagctggtcgggtggctggtggaccggggcatcacctccgagaagcagtggatccaggaggaccaggcctcgtacatctccttcaacgccgcctccaactcgcggtcccagatcaaggccgcgctggacaatgccggcaagatcatggcgctgaccaaatccgcgcccgactacctggtggggccctcgctgcccgcggacattacccagaaccgcatctaccgcatcctcgctctcaacggctacgaccctgcctacgccggctccgtctttctcggctgggctcagaaaaagttcgggaaacgcaacaccatctggctgtttggacccgccaccaccggcaagaccaacattgcggaagccatcgcccacgccgtgcccttctacggctgcgtcaactggaccaatgagaactttcccttcaatgattgcgtcgacaagatggtgatctggtgggaggagggcaagatgacggccaaggtcgtggagtccgccaaggccattctcggcggcagcaaggtgcgcgtggaccaaaagtgcaagtcgtccgcccagatcgaccccacccccgtgatcgtcacctccaacaccaacatgtgcgccgtgattgacgggaacagcaccaccttcgagcaccagcagcctctccaggaccggatgtttaagttcgaactcacccgccgtctggagcacgactttggcaaggtgacaaagcaggaagtcaaagagttcttccgctgggccagtgatcacgtgaccgaggtggcgcatgagttttacgtcagaaagggcggagccagcaaaagacccgcccccgatgacgcggataaaagcgagcccaagcgggcctgcccctcagtcgcggatccatcgacgtcagacgcggaaggagctccggtggactttgccgacaggtaccaaaacaaatgttctcgtcacgcgggcatgcttcagatgctgtttccctgcaaaacgtgcgagagaatgaatcagaatttcaacatttgcttcacacacggggtcagagactgctcagagtgtttccccggcgtgtcagaatctcaaccggtcgtcagaaagaggacgtatcggaaactctgtgcgattcatcatctgctggggcgggctcccgagattgcttgctcggcctgcgatctggtcaacgtggacctggatgactgtgtttctgagcaataaatgacttaaaccaggtatggctgccgatggttatcttccagattggctcgaggacaacctctctgagggcattcgcgagtggtgggcgctgaaacctggagccccgaagcccaaagccaaccagcaaaagcaggacgacggccggggtctggtgcttcctggctacaagtacctcggacccttcaacggactcgacaagggggagcccgtcaacgcggcggacgcagcggccctcgagcacgacaaggcctacgaccagcagctgcaggcgggtgacaatccgtacctgcggtataaccacgccgacgccgagtttcaggagcgtctgcaagaagatacgtcttttgggggcaacctcgggcgagcagtcttccaggccaagaagcgggttctcgaacctctcggtctggttgaggaaggcgctaagacggctcctggaaagaagagaccggtagagccatcaccccagcgttctccagactcctctacgggcatcggcaagaaaggccaacagcccgccagaaaaagactcaattttggtcagactggcgactcagagtcagttccagaccctcaacctctcggagaacctccagcagcgccctctggtgtgggacctaatacaatggctgcaggcggtggcgcaccaatggcagacaataacgaaggcgccgacggagtgggtagttcctcgggaaattggcattgcgattccacatggctgggcgacagagtcatcaccaccagcacccgaacctgggccctgcccacctacaacaaccacctctacaagcaaatctccaacgggacatcgggaggagccaccaacgacaacacctacttcggctacagcaccccctgggggtattttgactttaacagattccactgccacttttcaccacgtgactggcagcgactcatcaacaacaactggggattccggcccaagagactcagcttcaagctcttcaacatccaggtcaaggaggtcacgcagaatgaaggcaccaagaccatcgccaataacctcaccagcaccatccaggtgtttacggactcggagtaccagctgccgtacgttctcggctctgcccaccagggctgcctgcctccgttcccggcggacgtgttcatgattccccagtacggctacctaacactcaacaacggtagtcaggccgtgggacgctcctccttctactgcctggaatactttccttcgcagatgctgagaaccggcaacaacttccagtttacttacaccttcgaggacgtgcctttccacagcagctacgcccacagccagagcttggaccggctgatgaatcctctgattgaccagtacctgtactacttgtctcggactcaaacaacaggaggcacggcaaatacgcagactctgggcttcagccaaggtgggcctaatacaatggccaatcaggcaaagaactggctgccaggaccctgttaccgccaacaacgcgtctcaacgacaaccgggcaaaacaacaatagcaactttgcctggactgctgggaccaaataccatctgaatggaagaaattcattggctaatcctggcatcgctatggcaacacacaaagacgacgaggagcgtttttttcccagtaacgggatcctgatttttggcaaacaaaatgctgccagagacaatgcggattacagcgatgtcatgctcaccagcgaggaagaaatcaaaaccactaaccctgtggctacagaggaatacggtatcgtggcagataacttgcagcagcaaaacacggctcctcaaattggaactgtcaacagccagggggccttacccggtatggtctggcagaaccgggacgtgtacctgcagggtcccatctgggccaagattcctcacacggacggcaacttccacccgtctccgctgatgggcggctttggcctgaaacatcctccgcctcagatcctgatcaagaacacgcctgtacctgcggatcctccgaccaccttcaaccagtcaaagctgaactctttcatcacgcaatacagcaccggacaggtcagcgtggaaattgaatgggagctgcagaaggaaaacagcaagcgctggaaccccgagatccagtacacctccaactactacaaatctacaagtgtggactttgctgttaatacagaaggcgtgtactctgaaccccgccccattggcacccgttacctcacccgtaatctgtaattgcctgttaatcaataaaccggttgattcgtttcagttgaactttggtctctgcg

SEQ ID NO: 114 - protein, 738 aa, Adeno-associated virus 8; identical to SEQ ID NO: 105

SEQ ID NO: 115 - protein, 737 aa, Adeno-associated virus 8
MAADGYLPDWLEDNLSEGIREWWALKPGAPKPKANQQKQDDGRGLVLPGYKYLGPFNGLDKGEPVNAADAAALEHDKAYDQQLQAGDNPYLRYNHADAEFQERLQEDTSFGGNLGRAVFQAKKRVLEPLGLVEEGAKTAPGKKRPVEPSPQRSPDSSTGIGKKGQQPARKRLNFGQTGDSESVPDPQPLGEPPAAPSGVGPNTMAAGGGAPMADNNEGADGVGSSSGNWHCDSTWLGDRVITTSTRTWALPTYNNHLYKQISNGTSGGATNDNTYFGYSTPWGYFDFNRFHCHFSPRDWQRLINNNWGFRPKRLSFKLFNIQVKEVTQNEGTKTIANNLTSTIQVFTDSEYQLPYVLGSAHQGCLPPFPADVFMIPQYGYLTLNNGSQAVGRSSFYCLEYFPSQMLRTGNNFQFTYTFEDVPFHSSYAHSQSLDRLMNPLIDQYLYYLSRTQTTGGTANTQTLGFSQGGPNTMANQAKNWLPGPCYRQQRVSTTTGQNNNSNFAWTAGTKYHLNGRNSLANPGIAMATHKDDEERFFPSNGILIFGKQNAARDNADYSDVMLTSEEEIKTTNPVATEEYGIVADNLQQQNTAPQIGTVNSQGALPGMVWQNRDVYLQGPIWAKIPHTDGNFHPSPLMGGFGLKHPPPQILIKNTPVPADPPTTFNQSKLNSFITQYSTGQVSVEIEWELQKENSKRWNPEIQYTSNYYKSTSVDFAVIQKACTLNPAPLAPVTSPVI

SEQ ID NO: 116 - DNA, 2217 bp, Adeno-associated virus; identical to SEQ ID NO: 111

SEQ ID NO: 117 - DNA, 2214 bp, Artificial Sequence
  Description of Artificial Sequence: Synthetic polynucleotide
atggctgccgatggttatcttccagattggctcgaggacaacctctctgagggcattcgcgagtggtgggcgctgaaacctggagccccgaagcccaaagccaaccagcaaaagcaggacgacggccggggtctggtgcttcctggctacaagtacctcggacccttcaacggactcgacaagggggagcccgtcaacgcggcggacgcagcggccctcgagcacgacaaggcctacgaccagcagctgcaggcgggtgacaatccgtacctgcggtataaccacgccgacgccgagtttcaggagcgtctgcaagaagatacgtcttttgggggcaacctcgggcgagcagtcttccaggccaagaagcgggttctcgaacctctcggtctggttgaggaaggcgctaagacggctcctggaaagaagagaccggtagagccatcaccccagcgttctccagactcctctacgggcatcggcaagaaaggccaacagcccgccagaaaaagactcaattttggtcagactggcgactcagagtcagttccagaccctcaacctctcggagaacctccagcagcgccctctggtgtgggacctaatacaatggctgcaggcggtggcgcaccaatggcagacaataacgaaggcgccgacggagtgggtagttcctcgggaaattggcattgcgattccacatggctgggcgacagagtcatcaccaccagcacccgaacctgggccctgcccacctacaacaaccacctctacaagcaaatctccaacgggacatcgggaggagccaccaacgacaacacctacttcggctacagcaccccctgggggtattttgactttaacagattccactgccacttttcaccacgtgactggcagcgactcatcaacaacaactggggattccggcccaagagactcagcttcaagctcttcaacatccaggtcaaggaggtcacgcagaatgaaggcaccaagaccatcgccaataacctcaccagcaccatccaggtgtttacggactcggagtaccagctgccgtacgttctcggctctgcccaccagggctgcctgcctccgttcccggcggacgtgttcatgattccccagtacggctacctaacactcaacaacggtagtcaggccgtgggacgctcctccttctactgcctggaatactttccttcgcagatgctgagaaccggcaacaacttccagtttacttacaccttcgaggacgtgcctttccacagcagctacgcccacagccagagcttggaccggctgatgaatcctctgattgaccagtacctgtactacttgtctcggactcaaacaacaggaggcacggcaaatacgcagactctgggcttcagccaaggtgggcctaatacaatggccaatcaggcaaagaactggctgccaggaccctgttaccgccaacaacgcgtctcaacgacaaccgggcaaaacaacaatagcaactttgcctggactgctgggaccaaataccatctgaatggaagaaattcattggctaatcctggcatcgctatggcaacacacaaagacgacgaggagcgtttttttcccagtaacgggatcctgatttttggcaaacaaaatgctgccagagacaatgcggattacagcgatgtcatgctcaccagcgaggaagaaatcaaaaccactaaccctgtggctacagaggaatacggtatcgtggcagataacttgcctgagcggacggcgatgagtcttccgggaactgtcaacagccagggggccttacccggtatggtctggcagaaccgggacgtgtacctgcagggtcccatctgggccaagattcctcacacggacggcaacttccacccgtctccgctgatgggcggctttggcctgaaacatcctccgcctcagatcctgatcaagaacacgcctgtacctgcggatcctccgaccaccttcaaccagtcaaagctgaactctttcatcacgcaatacagcaccggacaggtcagcgtggaaattgaatgggagctgcagaaggaaaacagcaagcgctggaaccccgagatccagtacacctccaactactacaaatctacaagtgtggactttgctgttaatacagaaggcgtgtactctgaaccccgccccattggcacccgttacctcacccgtaatctg

SEQ ID NO: 118 - protein, 738 aa, Artificial Sequence
  Description of Artificial Sequence: Synthetic polypeptide
MAADGYLPDWLEDNLSEGIREWWALKPGAPKPKANQQKQDDGRGLVLPGYKYLGPFNGLDKGEPVNAADAAALEHDKAYDQQLQAGDNPYLRYNHADAEFQERLQEDTSFGGNLGRAVFQAKKRVLEPLGLVEEGAKTAPGKKRPVEPSPQRSPDSSTGIGKKGQQPARKRLNFGQTGDSESVPDPQPLGEPPAAPSGVGPNTMAAGGGAPMADNNEGADGVGSSSGNWHCDSTWLGDRVITTSTRTWALPTYNNHLYKQISNGTSGGATNDNTYFGYSTPWGYFDFNRFHCHFSPRDWQRLINNNWGFRPKRLSFKLFNIQVKEVTQNEGTKTIANNLTSTIQVFTDSEYQLPYVLGSAHQGCLPPFPADVFMIPQYGYLTLNNGSQAVGRSSFYCLEYFPSQMLRTGNNFQFTYTFEDVPFHSSYAHSQSLDRLMNPLIDQYLYYLSRTQTTGGTANTQTLGFSQGGPNTMANQAKNWLPGPCYRQQRVSTTTGQNNNSNFAWTAGTKYHLNGRNSLANPGIAMATHKDDEERFFPSNGILIFGKQNAARDNADYSDVMLTSEEEIKTTNPVATEEYGIVADNLPERTAMSLPGTVNSQGALPGMVWQNRDVYLQGPIWAKIPHTDGNFHPSPLMGGFGLKHPPPQILIKNTPVPADPPTTFNQSKLNSFITQYSTGQVSVEIEWELQKENSKRWNPEIQYTSNYYKSTSVDFAVNTEGVYSEPRPIGTRYLTRNL

SEQ ID NO: 119 - DNA, 2214 bp, Artificial Sequence
  Description of Artificial Sequence: Synthetic polynucleotide
atggctgccgatggttatcttccagattggctcgaggacaacctctctgagggcattcgcgagtggtgggcgctgaaacctggagccccgaagcccaaagccaaccagcaaaagcaggacgacggccggggtctggtgcttcctggctacaagtacctcggacccttcaacggactcgacaagggggagcccgtcaacgcggcggacgcagcggccctcgagcacgacaaggcctacgaccagcagctgcaggcgggtgacaatccgtacctgcggtataaccacgccgacgccgagtttcaggagcgtctgcaagaagatacgtcttttgggggcaacctcgggcgagcagtcttccaggccaagaagcgggttctcgaacctctcggtctggttgaggaaggcgctaagacggctcctggaaagaagagaccggtagagccatcaccccagcgttctccagactcctctacgggcatcggcaagaaaggccaacagcccgccagaaaaagactcaattttggtcagactggcgactcagagtcagttccagaccctcaacctctcggagaacctccagcagcgccctctggtgtgggacctaatacaatggctgcaggcggtggcgcaccaatggcagacaataacgaaggcgccgacggagtgggtagttcctcgggaaattggcattgcgattccacatggctgggcgacagagtcatcaccaccagcacccgaacctgggccctgcccacctacaacaaccacctctacaagcaaatctccaacgggacatcgggaggagccaccaacgacaacacctacttcggctacagcaccccctgggggtattttgactttaacagattccactgccacttttcaccacgtgactggcagcgactcatcaacaacaactggggattccggcccaagagactcagcttcaagctcttcaacatccaggtcaaggaggtcacgcagaatgaaggcaccaagaccatcgccaataacctcaccagcaccatccaggtgtttacggactcggagtaccagctgccgtacgttctcggctctgcccaccagggctgcctgcctccgttcccggcggacgtgttcatgattccccagtacggctacctaacactcaacaacggtagtcaggccgtgggacgctcctccttctactgcctggaatactttccttcgcagatgctgagaaccggcaacaacttccagtttacttacaccttcgaggacgtgcctttccacagcagctacgcccacagccagagcttggaccggctgatgaatcctctgattgaccagtacctgtactacttgtctcggactcaaacaacaggaggcacggcaaatacgcagactctgggcttcagccaaggtgggcctaatacaatggccaatcaggcaaagaactggctgccaggaccctgttaccgccaacaacgcgtctcaacgacaaccgggcaaaacaacaatagcaactttgcctggactgctgggaccaaataccatctgaatggaagaaattcattggctaatcctggcatcgctatggcaacacacaaagacgacgaggagcgtttttttcccagtaacgggatcctgatttttggcaaacaaaatgctgccagagacaatgcggattacagcgatgtcatgctcaccagcgaggaagaaatcaaaaccactaaccctgtggctacagaggaatacggtatcgtggcagataacttgagttttagtcgtgcggttctttgtgatggaactgtcaacagccagggggccttacccggtatggtctggcagaaccgggacgtgtacctgcagggtcccatctgggccaagattcctcacacggacggcaacttccacccgtctccgctgatgggcggctttggcctgaaacatcctccgcctcagatcctgatcaagaacacgcctgtacctgcggatcctccgaccaccttcaaccagtcaaagctgaactctttcatcacgcaatacagcaccggacaggtcagcgtggaaattgaatgggagctgcagaaggaaaacagcaagcgctggaaccccgagatccagtacacctccaactactacaaatctacaagtgtggactttgctgttaatacagaaggcgtgtactctgaaccccgccccattggcacccgttacctcacccgtaatctg

SEQ ID NO: 120 - protein, 738 aa, Artificial Sequence
  Description of Artificial Sequence: Synthetic polypeptide
MAADGYLPDWLEDNLSEGIREWWALKPGAPKPKANQQKQDDGRGLVLPGYKYLGPFNGLDKGEPVNAADAAALEHDKAYDQQLQAGDNPYLRYNHADAEFQERLQEDTSFGGNLGRAVFQAKKRVLEPLGLVEEGAKTAPGKKRPVEPSPQRSPDSSTGIGKKGQQPARKRLNFGQTGDSESVPDPQPLGEPPAAPSGVGPNTMAAGGGAPMADNNEGADGVGSSSGNWHCDSTWLGDRVITTSTRTWALPTYNNHLYKQISNGTSGGATNDNTYFGYSTPWGYFDFNRFHCHFSPRDWQRLINNNWGFRPKRLSFKLFNIQVKEVTQNEGTKTIANNLTSTIQVFTDSEYQLPYVLGSAHQGCLPPFPADVFMIPQYGYLTLNNGSQAVGRSSFYCLEYFPSQMLRTGNNFQFTYTFEDVPFHSSYAHSQSLDRLMNPLIDQYLYYLSRTQTTGGTANTQTLGFSQGGPNTMANQAKNWLPGPCYRQQRVSTTTGQNNNSNFAWTAGTKYHLNGRNSLANPGIAMATHKDDEERFFPSNGILIFGKQNAARDNADYSDVMLTSEEEIKTTNPVATEEYGIVADNLSFSRAVLCDGTVNSQGALPGMVWQNRDVYLQGPIWAKIPHTDGNFHPSPLMGGFGLKHPPPQILIKNTPVPADPPTTFNQSKLNSFITQYSTGQVSVEIEWELQKENSKRWNPEIQYTSNYYKSTSVDFAVNTEGVYSEPRPIGTRYLTRNL

SEQ ID NO: 121 - DNA, 4385 bp, Adeno-associated virus 9
cagagagggagtggccaactccatcactaggggtaatcgcgaagcgcctcccacgctgccgcgtcagcgctgacgtagattacgtcataggggagtggtcctgtattagctgtcacgtgagtgcttttgcgacattttgcgacaccacatggccatttgaggtatatatggccgagtgagcgagcaggatctccattttgaccgcgaaatttgaacgagcagcagccatgccgggcttctacgagattgtgatcaaggtgccgagcgacctggacgagcacctgccgggcatttctgactcttttgtgaactgggtggccgagaaggaatgggagctgcccccggattctgacatggatcggaatctgatcgagcaggcacccctgaccgtggccgagaagctgcagcgcgacttcctggtccaatggcgccgcgtgagtaaggccccggaggccctcttctttgttcagttcgagaagggcgagagctactttcacctgcacgttctggtcgagaccacgggggtcaagtccatggtgctaggccgcttcctgagtcagattcgggagaagctggtccagaccatctaccgcgggatcgagccgaccctgcccaactggttcgcggtgaccaagacgcgtaatggcgccggcggggggaacaaggtggtggacgagtgctacatccccaactacctcctgcccaagactcagcccgagctgcagtgggcgtggactaacatggaggagtatataagcgcgtgcttgaacctggccgagcgcaaacggctcgtggcgcagcacctgacccacgtcagccagacgcaggagcagaacaaggagaatctgaaccccaattctgacgcgcccgtgatcaggtcaaaaacctccgcgcgctacatggagctggtcgggtggctggtggaccggggcatcacctccgagaagcagtggatccaggaggaccaggcctcgtacatctccttcaacgccgcctccaactcgcggtcccagatcaaggccgcgctggacaatgccggcaagatcatggcgctgaccaaatccgcgcccgactacctggtaggcccttcacttccggtggacattacgcagaaccgcatctaccgcatcctgcagctcaacggctacgaccctgcctacgccggctccgtctttctcggctgggcacaaaagaagttcgggaaacgcaacaccatctggctgtttgggccggccaccacgggaaagaccaacatcgcagaagccattgcccacgccgtgcccttctacggctgcgtcaactggaccaatgagaactttcccttcaacgattgcgtcgacaagatggtgatctggtgggaggagggcaagatgacggccaaggtcgtggagtccgccaaggccattctcggcggcagcaaggtgcgcgtggaccaaaagtgcaagtcgtccgcccagatcgaccccactcccgtgatcgtcacctccaacaccaacatgtgcgccgtgattgacgggaacagcaccaccttcgagcaccagcagcctctccaggaccggatgtttaagttcgaactcacccgccgtctggagcacgactttggcaaggtgacaaagcaggaagtcaaagagttcttccgctgggccagtgatcacgtgaccgaggtggcgcatgagttttacgtcagaaagggcggagccagcaaaagacccgcccccgatgacgcggataaaagcgagcccaagcgggcctgcccctcagtcgcggatccatcgacgtcagacgcggaaggagctccggtggactttgccgacaggtaccaaaacaaatgttctcgtcacgcgggcatgcttcagatgctgcttccctgcaaaacgtgcgagagaatgaatcagaatttcaacatttgcttcacacacggggtcagagactgctcagagtgtttccccggcgtgtcagaatctcaaccggtcgtcagaaagaggacgtatcggaaactctgtgcgattcatcatctgctggggcgggctcccgagattgcttgctcggcctgcgatctggtcaacgtggacctggatgactgtgtttctgagcaataaatgacttaaaccaggtatggctgccgatggttatcttccagattggctcgaggacaacctctctgagggcattcgcgagtggtgggcgctgaaacctggagccccgaagcccaaagccaaccagcaaaagcaggacgacggccggggtctggtgcttcctggctacaagtacctcggacccttcaacggactcgacaagggggagcccgtcaacgcggcggacgcagcggccctcgagcacggcaaggcctacgaccagcagctgcaggcgggtgacaatccgtacctgcggtataaccacgccgacgccgagtttcaggagcgtctgcaagaagatacgtcttttgggggcaacctcgggcgagcagtcttccaggccaagaagcgggttctcgaacctctcggtctggttgaggaaggcgctaagacggctcctggaaagaagagaccggtagagccatcaccccagcgttctccagactcctctacgggcatcggcaagaaaggccaacagcccgccagaaaaagactcaattttggtcagactggcgactcagagtcagttccagaccctcaacctctcggagaacctccagcagcgccctctggtgtgggacctaatacaatggctgcaggcggtggcgcaccaatggcagacaataacgaaggcgccgacggagtgggtaattcctcgggaaattggcattgcgattccacatggctgggggacagagtcatcaccaccagcacccgaacctgggcattgcccacctacaacaaccacctctacaagcaaatctccaatggaacatcgggaggaagcaccaacgacaacacctactttggctacagcaccccctgggggtattttgacttcaacagattccactgccacttctcaccacgtgactggcagcgactcatcaacaacaactggggattccggccaaagagactcaacttcaagctgttcaacatccaggtcaaggaggttacgacgaacgaaggcaccaagaccatcgccaataaccttaccagcaccgtccaggtctttacggactcggagtaccagctaccgtacgtcctaggctctgcccaccaaggatgcctgccaccgtttcctgcagacgtcttcatggttcctcagtacggctacctgacgctcaacaatggaagtcaagcgttaggacgttcttctttctactgtctggaatacttcccttctcagatgctgagaaccggcaacaactttcagttcagctacactttcgaggacgtgcctttccacagcagctacgcacacagccagagtctagatcgactgatgaaccccctcatcgaccagtacctatactacctggtcagaacacagacaactggaactgggggaactcaaactttggcattcagccaagcaggccctagctcaatggccaatcaggctagaaactgggtacccgggccttgctaccgtcagcagcgcgtctccacaaccaccaaccaaaataacaacagcaactttgcgtggacgggagctgctaaattcaagctgaacgggagagactcgctaatgaatcctggcgtggctatggcatcgcacaaagacgacgaggaccgcttctttccatcaagtggcgttctcatatttggcaagcaaggagccgggaacgatggagtcgactacagccaggtgctgattacagatgaggaagaaattaaagccaccaaccctgtagccacagaggaatacggagcagtggccatcaacaaccaggccgctaacacgcaggcgcaaactggacttgtgcataaccagggagttattcctggtatggtctggcagaaccgggacgtgtacctgcagggccctatttgggctaaaatacctcacacagatggcaactttcacccgtctcctctgatgggtggatttggactgaaacacccacctccacagattctaattaaaaatacaccagtgccggcagatcctcctcttaccttcaatcaagccaagctgaactctttcatcacgcagtacagcacgggacaagtcagcgtggaaatcgagtgggagctgcagaaagaaaacagcaagcgctggaatccagagatccagtatacttcaaactactacaaatctacaaatgtggactttgctgtcaataccaaaggtgtttactctgagcctcgccccattggtactcgttacctcacccgtaatttgtaattgcctgttaatcaataaaccggttaattcgtttcagttgaactttggtctctgcg

SEQ ID NO: 122 - DNA, 4382 bp, Adeno-associated virus 9
cagagagggagtggccaactccatcactaggggtaatcgcgaagcgcctcccacgctgccgcgtcagcgctgacgtagattacgtcataggggagtggtcctgtattagctgtcacgtgagtgcttttgcgacattttgcgacaccacatggccatttgaggtatatatggccgagtgagcgagcaggatctccattttgaccgcgaaatttgaacgagcagcagccatgccgggcttctacgagattgtgatcaaggtgccgagcgacctggacgagcacctgccgggcatttctgactcttttgtgaactgggtggccgagaaggaatgggagctgcccccggattctgacatggatcggaatctgatcgagcaggcacccctgaccgtggccgagaagctgtagcgcgacttcctggtccaatggcgccgcgtgagtaaggccccggaggccctcttctttgttcagttcgagaagggcgagagctactttcacctgcacgttctggtcgagaccacgggggtcaagtccatggtgctaggccgcttcctgagtcagattcgggagaagctggtccagaccatctaccgcgggatcgagccgaccctgcccaactggttcgcggtgaccaagacgcgtaatggcgccggcggggggaacaaggtggtggacgagtgctacatccccaactacctcctgcccaagactcagcccgagctgcagtgggcgtggactaacatggaggagtatataagcgcgtgcttgaacctggccgagcgcaaacggctcgtggcgcagcacctgacccacgtcagccagacgcaggagcagaacaaggagaatctgaaccccaattctgacgcgcccgtgatcaggtcaaaaacctccgcgcgctacatggagctggtcgggtggctggtggaccggggcatcacctccgagaagcagtggatccaggaggaccaggcctcgtacatctccttcaacgccgcctccaactcgcggtcccagatcaaggccgcgctggacaatgccggcaagatcatggcgctgaccaaatccgcgcccgactacctggtaggcccttcacttccggtggacattacgcagaaccgcatctaccgcatcctgcagctcaacggctacgaccctgcctacgccggctccgtctttctcggctgggcacaaaagaagttcgggaaacgcaacaccatctggctgtttgggccggccaccacgggaaagaccaacatcgcagaagccattgcccacgccgtgcccttctacggctgcgtcaactggaccaatgagaactttcccttcaacgattgcgtcgacaagatggtgatctggtgggaggagggcaagatgacggccaaggtcgtggagtccgccaaggccattctcggcggcagcaaggtgcgcgtggaccaaaagtgcaagtcgtccgcccagatcgaccccactcccgtgatcgtcacctccaacaccaacatgtgcgccgtgattgacgggaacagcaccaccttcgagcaccagcagcctctccaggaccggatgtttaagttcgaactcacccgccgtctggagcacgactttggcaaggtgacaaagcaggaagtcaaagagttcttccgctgggccagtgatcacgtgaccgaggtggcgcatgagttttacgtcagaaagggcggagccagcaaaagacccgcccccgatgacgcggataaaagcgagcccaagcgggcctgcccctcagtcgcggatccatcgacgtcagacgcggaaggagctccggtggactttgccgacaggtaccaaaacaaatgttctcgtcacgcgggcatgcttcagatgctgcttccctgcaaaacgtgcgagagaatgaatcagaatttcaacatttgcttcacacacggggtcagagactgctcagagtgtttccccggcgtgtcagaatctcaaccggtcgtcagaaagaggacgtatcggaaactctgtgcgattcatcatctgctggggcgggctcccgagattgcttgctcggcctgcgatctggtcaacgtggacctggatgactgtgtttctgagcaataaatgacttaaaccaggtatggctgccgatggttatcttccagattggctcgaggacaacctctctgagggcattcgcgagtggtgggacctgaaacctggagccccgaaacccaaagccaaccagcaaaagcaggacgacggccggggtctggtgcttcctggctacaagtacctcggacccttcaacggactcgacaagggggagcccgtcaacgcggcggacgcagcggccctcgagcacgacaaggcctacgaccagcagctcaaagcgggtgacaatccgtacctgcggtataaccacgccgacgccgagtttcaggagcgtctgcaagaagatacgtcttttgggggcaacctcgggcgagcagtcttccaggccaagaagcgggttctcgaacctctcggtctggttgaggaaggcgctaagacggctcctggaaagaagagaccggtagagcagtcaccccaagaaccagactcatcctcgggcatcggcaaatcaggccagcagcccgctaaaaagagactcaattttggtcagactggcgactcagagtcagtccccgacccacaacctctcggagaacctccagaagccccctcaggtctgggacctaatacaatggcttcaggcggtggcgctccaatggcagacaataacgaaggcgccgacggagtgggtaattcctcgggaaattggcattgcgattccacatggctgggggacagagtcatcaccaccagcacccgaacctgggcattgcccacctacaacaaccacctctacaagcaaatctccaatggaacatcgggaggaagcaccaacgacaacacctactttggctacagcaccccctgggggtattttgacttcaacagattccactgccacttctcaccacgtgactggcagcgactcatcaacaacaactggggattccggccaaagagactcaacttcaagctgttcaacatccaggtcaaggaggttacgacgaacgaaggcaccaagaccatcgccaataaccttaccagcaccgtccaggtctttacggactcggagtaccagctaccgtacgtcctaggctctgcccaccaaggatgcctgccaccgtttcctgcagacgtcttcatggttcctcagtacggctacctgacgctcaacaatggaagtcaagcgttaggacgttcttctttctactgtctggaatacttcccttctcagatgctgagaaccggcaacaactttcagttcagctacactttcgaggacgtgcctttccacagcagctacgcacacagccagagtctagatcgactgatgaaccccctcatcgaccagtacctatactacctggtcagaacacagacaactggaactgggggaactcaaactttggcattcagccaagcaggccctagctcaatggccaatcaggctagaaactgggtacccgggccttgctaccgtcagcagcgcgtctccacaaccaccaaccaaaataacaacagcaactttgcgtggacgggagctgctaaattcaagctgaacgggagagactcgctaatgaatcctggcgtggctatggcatcgcacaaagacgacgaggaccgcttctttccatcaagtggcgttctcatatttggcaagcaaggagccgggaacgatggagtcgactacagccaggtgctgattacagatgaggaagaaattaaagccaccaaccctgtagccacagaggaatacggagcagtggccatcaacaaccaggccgctaacacgcaggcgcaaactggacttgtgcataaccagggagttattcctggtatggtctggcagaaccgggacgtgtacctgcagggccctatttgggctaaaatacctcacacagatggcaactttcacccgtctcctctgatgggtggatttggactgaaacacccacctccacagattctaattaaaaatacaccagtgccggcagatcctcctcttaccttcaatcaagccaagctgaactctttcatcacgcagtacagcacgggacaagtcagcgtggaaatcgagtgggagctgcagaaagaaaacagcaagcgctggaatccagagatccagtatacttcaaactactacaaatctacaaatgtggactttgctgtcaataccgaaggtgtttactctgagcctcgccccattggtactcgttacctcacccgtaatttgtaattgcctgttaatcaataaaccggttaattcgtttcagttgaactttggtctctgcg

SEQ ID NO: 123 - protein, 736 aa, Adeno-associated virus 9
MAADGYLPDWLEDNLSEGIREWWALKPGAPQPKANQQHQDNARGLVLPGYKYLGPGNGLDKGEPVNAADAAALEHDKAYDQQLKAGDNPYLKYNHADAEFQERLKEDTSFGGNLGRAVFQAKKRLLEPLGLVEEAAKTAPGKKRPVEQSPQEPDSSAGIGKSGAQPAKKRLNFGQTGDTESVPDPQPIGEPPAAPSGVGSLTMASGGGAPVADNNEGADGVGSSSGNWHCDSQWLGDRVITTSTRTWALPTYNNHLYKQISNSTSGGSSNDNAYFGYSTPWGYFDFNRFHCHFSPRDWQRLINNNWGFRPKRLNFKLFNIQVKEVTDNNGVKTIANNLTSTVQVFTDSDYQLPYVLGSAHEGCLPPFPADVFMIPQYGYLTLNDGSQAVGRSSFYCLEYFPSQMLRTGNNFQFSYEFENVPFHSSYAHSQSLDRLMNPLIDQYLYYLSKTINGSGQNQQTLKFSVAGPSNMAVQGRNYIPGPSYRQQRVSTTVTQNNNSEFAWPGASSWALNGRNSLMNPGPAMASHKEGEDRFFPLSGSLIFGKQGTGRDNVDADKVMITNEEEIKTTNPVATESYGQVATNHQSAQAQAQTGWVQNQGILPGMVWQDRDVYLQGPIWAKIPHTDGNFHPSPLMGGFGMKHPPPQILIKNTPVPADPPTAFNKDKLNSFITQYSTGQVSVEIEWELQKENSKRWNPEIQYTSNYYKSNNVEFAVNTEGVYSEPRPIGTRYLTRNL

SEQ ID NO: 124 - protein, 736 aa, Artificial Sequence
  Description of Artificial Sequence: Synthetic polypeptide
MAADGYLPDWLEDNLSEGIREWWDLKPGAPKPKANQQKQDDGRGLVLPGYKYLGPFNGLDKGEPVNAADAAALEHDKAYDQQLKAGDNPYLRYNHADAEFQERLQEDTSFGGNLGRAVFQAKKRVLEPLGLVEEGAKTAPGKKRPVEQSPQEPDSSSGIGKSGQQPAKKRLNFGQTGDSESVPDPQPLGEPPEAPSGLGPNTMASGGGAPMADNNEGADGVGNSSGNWHCDSTWLGDRVITTSTRTWALPTYNNHLYKQISNGTSGGSTNDNTYFGYSTPWGYFDFNRFHCHFSPRDWQRLINNNWGFRPKRLNFKLFNIQVKEVTTNEGTKTIANNLTSTVQVFTDSEYQLPYVLGSAHQGCLPPFPADVFMVPQYGYLTLNNGSQALGRSSFYCLEYFPSQMLRTGNNFQFSYTFEDVPFHSSYAHSQSLDRLMNPLIDQYLYYLVRTQTTGTGGTQTLAFSQAGPSSMANQARNWVPGPCYRQQRVSTTTNQNNNSNFAWTGAAKFKLNGRDSLMNPGVAMASHKDDEDRFFPSSGVLIFGKQGAGNDGVDYSQVLITDEEEIKATNPVATEEYGAVAINNQAANTQAQTGLVHNQGVIPGMVWQNRDVYLQGPIWAKIPHTDGNFHPSPLMGGFGLKHPPPQILIKNTPVPADPPLTFNQAKLNSFITQYSTGQVSVEIEWELQKENSKRWNPEIQYTSNYYKSTNVDFAVNTEGVYSEPRPIGTRYLTRNL

SEQ ID NO: 125 - protein, 623 aa, Artificial Sequence
  Description of Artificial Sequence: Synthetic polypeptide
MPGFYEIVIKVPSDLDEHLPGISDSFVNWVAEKEWELPPDSDMDRNLIEQAPLTVAEKLQRDFLVQWRRVSKAPEALFFVQFEKGESYFHLHVLVETTGVKSMVLGRFLSQIREKLVQTIYRGIEPTLPNWFAVTKTRNGAGGGNKVVDECYIPNYLLPKTQPELQWAWTNMEEYISACLNLAERKRLVAQHLTHVSQTQEQNKENLNPNSDAPVIRSKTSARYMELVGWLVDRGITSEKQWIQEDQASYISFNAASNSRSQIKAALDNAGKIMALTKSAPDYLVGPSLPVDITQNRIYRILQLNGYDPAYAGSVFLGWAQKKFGKRNTIWLFGPATTGKTNIAEAIAHAVPFYGCVNWTNENFPFNDCVDKMVIWWEEGKMTAKVVESAKAILGGSKVRVDQKCKSSAQIDPTPVIVTSNTNMCAVIDGNSTTFEHQQPLQDRMFKFELTRRLEHDFGKVTKQEVKEFFRWASDHVTEVAHEFYVRKGGASKRPAPDDADKSEPKRACPSVADPSTSDAEGAPVDFADRYQNKCSRHAGMLQMLLPCKTCERMNQNFNICFTHGVRDCSECFPGVSESQPVVRKRTYRKLCAIHHLLGRAPEIACSACDLVNVDLDDCVSEQ

SEQ ID NO: 126 - DNA, 2211 bp, Adeno-associated virus
atggctgccgatggttatcttccagattggctcgaggacaaccttagtgaaggaattcgcgagtggtgggctttgaaacctggagcccctcaacccaaggcaaatcaacaacatcaagacaacgctcgaggtcttgtgcttccgggttacaaataccttggacccggcaacggactcgacaagggggagccggtcaacgcagcagacgcggcggccctcgagcacgacaaggcctacgaccagcagctcaaggccggagacaacccgtacctcaagtacaaccacgccgacgccgagttccaggagcggctcaaagaagatacgtcttttgggggcaacctcgggcgagcagtcttccaggccaaaaagaggcttcttgaacctcttggtctggttgaggaagcggctaagacggctcctggaaagaagaggcctgtagagcagtctcctcaggaaccggactcctccgcgggtattggcaaatcgggtgcacagcccgctaaaaagagactcaatttcggtcagactggcgacacagagtcagtcccagaccctcaaccaatcggagaacctcccgcagccccctcaggtgtgggatctcttacaatggcttcaggtggtggcgcaccagtggcagacaataacgaaggtgccgatggagtgggtagttcctcgggaaattggcattgcgattcccaatggctgggggacagagtcatcaccaccagcacccgaacctgggccctgcccacctacaacaatcacctctacaagcaaatctccaacagcacatctggaggatcttcaaatgacaacgcctacttcggctacagcaccccctgggggtattttgacttcaacagattccactgccacttctcaccacgtgactggcagcgactcatcaacaacaactggggattccggcctaagcgactcaacttcaagctcttcaacattcaggtcaaagaggttacggacaacaatggagtcaagaccatcgccaataaccttaccagcacggtccaggtcttcacggactcagactatcagctcccgtacgtgctcgggtcggctcacgagggctgcctcccgccgttcccagcggacgttttcatgattcctcagtacgggtatctgacgcttaatgatggaagccaggccgtgggtcgttcgtccttttactgcctggaatatttcccgtcgcaaatgctaagaacgggtaacaacttccagttcagctacgagtttgagaacgtacctttccatagcagctacgctcacagccaaagcctggaccgactaatgaatccactcatcgaccaatacttgtactatctctcaaagactattaacggttctggacagaatcaacaaacgctaaaattcagtgtggccggacccagcaacatggctgtccagggaagaaactacatacctggacccagctaccgacaacaacgtgtctcaaccactgtgactcaaaacaacaacagcgaatttgcttggcctggagcttcttcttgggctctcaatggacgtaatagcttgatgaatcctggacctgctatggccagccacaaagaaggagaggaccgtttctttcctttgtctggatctttaatttttggcaaacaaggaactggaagagacaacgtggatgcggacaaagtcatgataaccaacgaagaagaaattaaaactactaacccggtagcaacggagtcctatggacaagtggccacaaaccaccagagtgcccaagcacaggcgcagaccggctgggttcaaaaccaaggaatacttccgggtatggtttggcaggacagagatgtgtacctgcaaggacccatttgggccaaaattcctcacacggacggcaactttcacccttctccgctgatgggagggtttggaatgaagcacccgcctcctcagatcctcatcaaaaacacacctgtacctgcggatcctccaacggccttcaacaaggacaagctgaactctttcatcacccagtattctactggccaagtcagcgtggagatcgagtgggagctgcagaaggaaaacagcaagcgctggaacccggagatccagtacacttccaactattacaagtctaataatgttgaatttgctgttaatactgaaggtgtatatagtgaaccccgccccattggcaccagatacctgactcgtaatctgtaa

SEQ ID NO: 127 - protein, 736 aa, Adeno-associated virus; identical to SEQ ID NO: 123

SEQ ID NO: 128 - DNA, 2460 bp, Adeno-associated virus
ggtaattcctccggaaattggcattgcgattccacatggctgggcgaccgagtcattaccaccagcacccggacttgggccctgcccacctacaacaaccacctctacaagcaaatctccagccaatcgggtgccaccaacgacaaccactacttcggctacagcaccccttgggggtattttgatttcaacagattccactgccatttctcaccacgtgactggcagcgactcatcaacaacaactggggattcatggctgccgatggttatcttccagattggctcgaggacactctctctgaaggaatcagacagtggtggaagctcaaacctggcccaccaccgccgaaacctaaccaacaacaccgggacgacagtaggggtcttgtgcttcctgggtacaagtacctcggacccttcaacggactcgacaaaggagagccggtcaacgaggcagacgccgcggccctcgagcacgacaaagcctacgaccaccagctcaagcaaggggacaacccgtacctcaaatacaaccacgcggacgctgaatttcaggagcgtcttcaagaagatacgtctttcgggggcaacctcgggcgagcagtcttccaggccaaaaagagggtactcgagcctcttggtctggttgaggaagctgttaagacggctcctggaaaaaagagacctatagagcagtctcctgcagaaccggactcttcctcgggcatcggcaaatcaggccagcagcccgctaagaaaagactcaattttggtcagactggcgacacagagtcagtcccagaccctcaaccaatcggagaaccccccgcagccccctctggtgtgggatctaatacaatggcttcaggcggtggggcaccaatggcagacaataacgaaggcgccgacggagtgggtaattcctcgggaaattggcattgcgattccacatggatgggcgacagagttatcaccaccagcacaagaacctgggccctccccacctacaataatcacctctacaagcaaatctccagcgaatcgggagccaccaacgacaaccactacttcggctacagcaccccctgggggtattttgactttaacagattccactgtcacttctcaccacgtgactggcagcgactcatcaacaacaactggggatttagacccaagaaactcaatttcaagctcttcaacatccaagtcaaggaggtcacgcagaatgatggaaccacgaccatcgccaataaccttaccagcacggtgcaggtcttcacagactctgagtaccagctgccctacgtcctcggttcggctcaccagggctgccttccgccgttcccagcagacgtcttcatgattcctcagtacggctacttgactctgaacaatggcagccaagcggtaggacgttcttcattctactgtctagagtattttccctctcagatgctgaggacgggaaacaacttcaccttcagctacacttttgaagacgtgcctttccacagcagctacgcgcacagccagagtctggatcggctgatgaatcctctcattgaccagtacctgtattacctgagcaaaactcagggtacaagtggaacaacgcagcaatcgagactgcagttcagccaagctgggcctagctccatggctcagcaggccaaaaactggctaccgggacccagctaccgacagcagcgaatgtctaagacggctaatgacaacaacaacagtgaatttgcttggactgcagccaccaaatattacctgaatggaagaaattctctggtcaatcccgggcccccaatggccagtcacaaggacgatgaggaaaagtatttccccatgcacggaaatctcatctttggaaaacaaggcacaggaactaccaatgtggacattgaatcagtgcttattacagacgaagaagaaatcagaacaactaatcctgtggctacagaacaatacggacaggttgccaccaaccatcagagtcagaacaccacagcttcctatggaagtgtggacagccagggaatcttacctggaatggtgtggcaggaccgcgatgtctatcttcaaggtcccatttgggccaaaactcctcacacggacggacactttcatccttctccgctcatgggaggctttggactgaaacaccctcctccccagatcctgatcaaaaacacacctgtgccagcgaatcccgcgaccactttcactcctggaaagtttgcttcgttcattacccagtattccaccggacaggtcagcgtggaaatagagtgggagctgcagaaagaaaacagcaaacgctggaacccagaaattcagtacacctccaactacaacaagtcggtgaatgtggagtttaccgtggacgcaaacggtgtttattctgaaccccgccctattggcactcgttaccttacccggaacttg

SEQ ID NO: 129 - DNA, 3123 bp, Adeno-associated virus
gaattcgccctttctacggctgcgtcaactggaccaatgaaaactttcccttcaacgattgcgtcgacaagatggtgatctggtgggaggagggaaagatgaccgccaaggtcgtggaatctgccaaagccattctgggtggaggcaaggttcgtgtggaccagaaatgcaagtcttcggcccagatcgacccgactccggtgattgtcacctctaacaccaacatgtgcgccgtgattgacggaaactcgaccaccttcgagcaccagcagccgttgcaagaccggatgttcaaatttgaacttacccgccgtttggatcatgactttgggaaggtcaccaagcaggaagtcaaagactttttccggtgggctcaagatcacgtgactgaggtggagcatgagttctacgtcaaaaagggtggagccaagaaaaggcccgcccccgatgatgtatatataaatgagcccaagcgggcgcgcgagtcagttgcgcagccatcgacgtcagacgcggaagcttcgataaactacgcggacaggtaccaaaacaaatgttctcgtcacgtgggcatgaatctgatgctgtttccctgtcgacaatgcgaaagaatgaatcagaattcaaatatctgcttcacacacgggcaaaaagactgtttggaatgctttcccgtgtcagaatctcaacccgtttctgtcgtcagaaaaacgtatcagaaactttgttacattcatcatatcatgggaaaagtaccagacgcctgcactgcctgcgacctggtaaatgtggacttggatgactgtatttctgagcaataaatgacttaaatcaggtatggctgctgacggttatcttccagattggctcgaggacactctctctgaaggaatcagacagtggtggaagctcaaacctggcccaccaccgccgaaacctaaccaacaacaccgggacgacagtaggggtcttgtgcttcctgggtacaagtacctcggacccttcaacggactcgacaaaggagagccggtcaacgaggcagacgccgcggccctcgagcacgacaaagcctacgaccaccagctcaagcaaggggacaacccgtacctcaaatacaaccacgcggacgctgaatttcaggagcgtcttcaagaagatacgtctttcgggggcaacctcgggcgagcagtcttccaggccaaaaagagggtactcgagcctcttggtctggttgaggaagctgttaagacggctcctggaaaaaagagacctatagagcagtctcctgcagaaccggactcttcctcgggcatcggcaaatcaggccagcagcccgctaagaaaagactcaattttggtcagactggcgacacagagtcagtcccaggccctcaaccaatcggagaaccccccgcagccccctctggtgtgggatctaatacaatggcttcaggcggtggggcaccaatggcagacaataacgaaggcgccgacggagtgggtaattcctcgggaaattggcattgcgattccacatggatgggcgacagagttatcaccaccagcacaagaacctgggccctccccacctacaataatcacctctacaagcaaatctccagcgaatcgggagccaccaacgacaaccactacttcggctacagcaccccctgggggtattttgactttaacagattccactgtcacttctcaccacgtgactggcagcgactcatcaacaacaactggggatttagacccaagaaactcaatttcaagctcttcaacatccaagtcaaggaggtcacgcagaatgatggaaccacgaccatcgccaataaccttaccagcgcggtgcaggtcttcacagactctgagtaccagctgccctacgtcctcggttcggctcaccagggctgccttccgccgttcccagcagacgtcttcatgattcctcagtacggctacttgactctgaacaatggcagccaagcggtaggacgttcttcattctactgtctagagtattttccctctcagatgctgaggacgggaaacaacttcaccttcagctacacttttgaagacgtgcctttccacagcagctacgcgcacagccagagtctggatcggctgatgaatcctctcattgaccagtacctgtattacctgagcaaaactcagggtacaagtggaacaacgcagcaatcgagactgcagttcagccaagctgggcctagctccatggctcagcaggccaaaaactggctaccgggacccagctaccgacagcagcgaatgtctaagacggctaatgacaacaacaacagtgaatttgcttggactgcagccaccaaatattacctgaatggaagaaattctctggtcaatcccgggcccccagtggccagtcacaaggacgatgaggaaaagtatttccccatgcacggaaatctcatctttggaaaacaaggcacaggaactaccaatgtggacattgaatcagtgcttattacagacgaagaagaaatcagaacaactaatcctgtggctacagaacaatacggacaggttgccaccaaccatcagagtcagaacaccacagcttcctatggaagtgtggacagccagggaatcttacctggaatggtgtggcaggaccgcgatgtctatcttcaaggtcccatttgggccaaaactcctcacacggacggacactttcatccttctccgctcatgggaggctttggactgaaacaccctcctccccagatcctgatcaaaaacacacctgtgccagcgaatcccgcgaccactttcactcctggaaagtttgcttcgttcattacccagtattccacctgacaggtcagcgtggaaatagagtgggagctgcagaaagaaaacagcaaacgctggaacccagaaattcagtacacctccaactacaacaagtcggtgaatgtggagtttaccgtggacgcaaacggtgtttattctgaaccccgccctattggcactcgttaccttacccggaacttgtaatttcctgttaatgaataagccgatttatgcgtttcagttgaactttggtctctgcgaagggcgaattcgtttaaacct

SEQ ID NO: 130 - protein, 735 aa, Artificial Sequence
  Description of Artificial Sequence: Synthetic polypeptide
MAADGYLPDWLEDTLSEGIRQWWKLKPGPPPPKPNQQHRDDSRGLVLPGYKYLGPFNGLDKGEPVNEADAAALEHDKAYDHQLKQGDNPYLKYNHADAEFQERLQEDTSFGGNLGRAVFQAKKRVLEPLGLVEEAVKTAPGKKRPIEQSPAEPDSSSGIGKSGQQPAKKRLNFGQTGDTESVPGPQPIGEPPAAPSGVGSNTMASGGGAPMADNNEGADGVGNSSGNWHCDSTWMGDRVITTSTRTWALPTYNNHLYKQISSESGATNDNHYFGYSTPWGYFDFNRFHCHFSPRDWQRLINNNWGFRPKKLNFKLFNIQVKEVTQNDGTTTIANNLTSAVQVFTDSEYQLPYVLGSAHQGCLPPFPADVFMIPQYGYLTLNNGSQAVGRSSFYCLEYFPSQMLRTGNNFTFSYTFEDVPFHSSYAHSQSLDRLMNPLIDQYLYYLSKTQGTSGTTQQSRLQFSQAGPSSMAQQAKNWLPGPSYRQQRMSKTANDNNNSEFAWTAATKYYLNGRNSLVNPGPPVASHKDDEEKYFPMHGNLIFGKQGTGTTNVDIESVLITDEEEIRTTNPVATEQYGQVATNHQSQNTTASYGSVDSQGILPGMVWQDRDVYLQGPIWAKTPHTDGHFHPSPLMGGFGLKHPPPQILIKNTPVPANPATTFTPGKFASFITQYSTGQVSVEIEWELQKENSKRWNPEIQYTSNYNKSVNVEFTVDANGVYSEPRPIGTRYLTRNL

SEQ ID NO: 131 - DNA, 3123 bp, Adeno-associated virus
gaattcgccctttctacggctgcgtcaactggaccaatgaaaactttcccttcaacgattgcgtcgacaagatggtgatctggtgggaggagggaaagatgaccgccaaggtcgtggaatctgccaaagccattctgggtggaagcaaggttcgtgtggaccagaaatgcaagtcttcggcccagatcgacccgactccggtgattgtcacctctaacaccaacatgtgcgccgtgattgacggaaactcgaccaccttcgagcaccagcagccgttgcaagaccggatgttcaaatttgaacttacccgccgtttggatcatgactttgggaaggtcaccaagcaggaagtcaaagactttttccggtgggctcaagatcacgtgactgaggtggagcatgagttctacgtcaaaaagggtggagccaagaaaaggcccgcccccgatgatgtatatataaatgagcccaagcgggcgcgcgagtcagttgcgcagccatcgacgtcagacgcggaagcttcgataaactacgcgggcaggtaccaaaacaaatgttctcgtcacgtgggcatgaatctgatgctgtttccctgtcgacaatgcgaaagaatgaatcagaattcaaatatctgcttcacacacgggcaaaaagactgtttggaatgctttcccgtgtcagaatctcaacccgtttctgtcgtcagaaaaacgtatcagaaactttgttacattcatcatatcatgggaaaagaaccagacgcctgcactgcctgcgacctggtaaatgtggacttggatgactgtatttctgagcaataaatgacttaaatcaggtatggctgctgacggttatcttccagattggctcgaggacactctctctgaaggaatcagacagtggtggaagctcaaacctggcccaccaccgccgaaacctaaccaacaacaccgggacgacagtaggggtcttgtgcttcctgggtacaagtacctcggacccttcaacggactcgacaaaggagagccggtcaacgaggcagacgccgcggccctcgagcacgacaaagcctacgaccaccagctcaagcaaggggacaacccgtacctcaaatacaaccacgcggacgctgaatttcaggagcgtcttcaagaagatacgtctttcgggggcaacctcgggcgagcagtcttccaggccaaaaagagggtactcgagcctcttggtctggttgaggaagctgttaagacggctcctggaaaaaagagacctatagagcagtctcctgcagaaccggactcttcctcgggcatcggcgaatcaggccagcagcccgctaagaaaagactcaattttggtcagactggcgacacagagtcagtcccagaccctcaaccaatcggagaaccccccgcagccccctctggtgtgggatctaatacaatggcttcaggcggtggggcaccaatggcagacgataacgaaggcgccgacggagtgggtaattcctcgggaaattggcattgcgattccacatggatgggcgacagagttatcaccaccagcacaagaacctgggccctccccacctacaataatcacctctacaagcaaatctccagcgaatcgggagccaccaacgacaaccactacttcggctacagcaccccctgggggtattttgactttaacagattccactgtcacttctcaccacgtgactggcagcgactcatcaacaacaactggggatttagacccaagaaactcaatttcaagctcttcaacatccaagtcaaggaggtcacgcagaatgatggaaccacgaccatcgccaataaccttaccagcacggtgcaggtcttcacagactctgagtaccagctgccctacgtcctcggttcggctcaccagggctgccttccgccgttcccagcagacgtcttcatgattcctcagtacggctacttgactctgaacaatggcagccaagcggtaggacgttcttcattctactgtctagagtattttccctctcagatgctgaggacgggaaacaacttcaccttcagctacacttttgaagacgtgcctttccacagcagctacgcgcacagccagagtctggatcggctgatgaatcctctcattgaccagtacctgtattacctgagcaaaactcagggtacaagtggaacaacgcagcaatcgagactgcagttcagccaagctgggcctagctccatggctcagcaggccaaaaactggctaccgggacccagctaccgacagcagcgaatgtctaagacggctaatgacaacaacaacagtgaatttgcttggactgcagccaccaaatattacctgaatggaagaaattctctggtcaatcccgggcccccaatggccagtcacaaggacgatgaggaaaagtatttccccatgcacggaaatctcatctttggaaaacaaggcacaggaactaccaatgtggacattgaatcagtgcttattacagacgaagaagaaatcagaacaactaatcctgtggctacagaacaatacggacaggttgccaccaaccatcagagtcaggacaccacagcttcctatggaagtgtggacagccagggaatcttacctggaatggtgtggcaggaccgcgatgtctatcttcaaggtcccatttgggccaaaactcctcacacggacggacactttcatccttctccgctcatgggaggctttggactgaaacaccctcctccccagatcctgatcaaaaacacacctgtgccagcgaatcccgcgaccactttcactcctggaaagtttgcttcgttcattacccagtattccaccggacaggtcagcgtggaaatagagtgggagctgcagaaagaaaacagcaaacgctggaacccagaaattcagtacacctccaactacaacaagtcggtgaatgtggagtttaccgtggacgcaaacggtgtttattctgaaccccgccctattggcactcgttaccttacccggaacttgtaatttcctgttaatgaataaaccgatttatgcgtttcagttgaactttggtctctgcgaagggcgaattcgcggccgcta

SEQ ID NO: 132 - protein, 735 aa, Artificial Sequence
  Description of Artificial Sequence: Synthetic polypeptide
MAADGYLPDWLEDTLSEGIRQWWKLKPGPPPPKPNQQHRDDSRGLVLPGYKYLGPFNGLDKGEPVNEADAAALEHDKAYDHQLKQGDNPYLKYNHADAEFQERLQEDTSFGGNLGRAVFQAKKRVLEPLGLVEEAVKTAPGKKRPIEQSPAEPDSSSGIGESGQQPAKKRLNFGQTGDTESVPDPQPIGEPPAAPSGVGSNTMASGGGAPMADDNEGADGVGNSSGNWHCDSTWMGDRVITTSTRTWALPTYNNHLYKQISSESGATNDNHYFGYSTPWGYFDFNRFHCHFSPRDWQRLINNNWGFRPKKLNFKLFNIQVKEVTQNDGTTTIANNLTSTVQVFTDSEYQLPYVLGSAHQGCLPPFPADVFMIPQYGYLTLNNGSQAVGRSSFYCLEYFPSQMLRTGNNFTFSYTFEDVPFHSSYAHSQSLDRLMNPLIDQYLYYLSKTQGTSGTTQQSRLQFSQAGPSSMAQQAKNWLPGPSYRQQRMSKTANDNNNSEFAWTAATKYYLNGRNSLVNPGPPMASHKDDEEKYFPMHGNLIFGKQGTGTTNVDIESVLITDEEEIRTTNPVATEQYGQVATNHQSQDTTASYGSVDSQGILPGMVWQDRDVYLQGPIWAKTPHTDGHFHPSPLMGGFGLKHPPPQILIKNTPVPANPATTFTPGKFASFITQYSTGQVSVEIEWELQKENSKRWNPEIQYTSNYNKSVNVEFTVDANGVYSEPRPIGTRYLTRNL

SEQ ID NO: 133 - DNA, 3113 bp, Adeno-associated virus
gaattcgccctttctacggctgcgtcaactggaccaatgaaaactttcccttcaacgattgcgtcgacaagatggtgatctggtgggaggagggaaagatgaccgccaaggtcgtggaatctgccaaagccattctgggtggaagcaaggttcgtgtggaccagaaatgcaagtcttcggcccagatcgacccgactccggtgattgtcacctctaacaccaacatgtgcgccgtgattgacggaaactcgaccaccttcgagcaccagcagccgttgcaagaccggatgttcaaatttgaacttacccgccgtttggatcatgactttgggaaggtcaccaagcaggaagtcaaagactttttccggtgggctcaagatcacgtgactgaggtggagcatgagttctacgtcaaaaagggtggagccaagaaaaggcccgcccccgatgatgtatatataaatgagcccaagcgggcgcgcgagtcagttgcgcagccatcgacgtcagacgcggaagcttcgataaactacgcggacaggtaccaaaacaaatgttctcgtcacgtgggcatgaatctgatgctgtttccctgtcgacaatgcgaaagaatgaatcagaattcaaatatctgcttcacacacgggcaaaaagactgtttggaatgctttcccgtgtcagaatctcaacccgttcctgtcgtcagaaaaacgtatcagaaactttgttacattcatcatatcatgggaaaagtaccagacgcctgcactgcctgcgacctggtaaatgtggacttggatgactgtatttctgagcaataaatgacttaaatcaggtatggctgctgacggttatcttccagattggctcgaggacactctctctgaaggaatcagacagtggtggaagctcaaacctggcccaccaccgccgaaacctaaccaacaacaccgggacgacagtaggggtcttgtgcttcctgggtacaagtacctcggacccttcaacggactcgacaaaggagagccggtcaacgaggcagacgccgcggccctcgagcacgacaaagcctacgaccaccagctcaagcaaggggacaacccgtacctcaaatacaaccacgcggacgctgaatttcaggagcgtcttcaagaagatacgtctttcgggggcaacctcgggcgagcagtcttccaggccaaaaagagggtactcgagcctcttggtctggttgaggaagctgttaagacggctcctggaaaaaagagacctatagagcagtctcctgcagaaccggactcttcctcgggcatcggcaaatcaggccagcagcccgctaagaaaagactcaattttggtcagactggcgacacagagtcagtcccagaccctcaaccaatcggagaaccccccgcagccccctctggtgtgggatctaatacaatggcttcaggcggtggggcaccaatggcagacaataacgaaggcgccgacggagtgggtaattcctcgggaaattggcattgcgattccacatggatgggcgacagagttatcaccaccagcacaagaacctgggccctccccacctacaataatcacctctacaagcaaatctccagcgaatcgggagccaccaacgacaaccactacttcggctacagcaccccctgggggtattttgactttaacagattccactgtcacttctcaccacgtgactggcagcgactcatcaataacaactggggatttagacccaagaaactcaatttcaagctcttcaacatccaagtcaaggaggtcacgcagaatgatggaaccacgaccatcgccaataaccttaccagcacggtgcaggtcttcacagactctgagtaccagctgccctacgtcctcggttcggctcaccagggctgccttccgccgttcccagcagacgtcttcatgattcctcagtacggctacttgactctgaacaatggcagccaagcggtaggacgttcttcattctactgtctagagtattttccctctcagatgctgaggacgggaaacaacttcaccttcagctacacttttgaagacgtgcctttccacagcagctacgcgcacagccagagtctggatcggctgatgaatcctctcattgaccagtacctgtattacctgagcaaaactcagggtacaagtggaacaacgcagcaatcgagactgcagttcaaccaagctgggcctagctccatggctcagcaggccaaaaactggctaccgggacccagctaccgacagcagcgaatgtctaagacggctaatgacaacaacaacagtgaatttgcttggactgcagccaccaaatattacccgaatggaagaaattctctggtcaatcccgggcccccaatggccagtcacaaggacgatgaggaaaagtatttccccatgcacggaaatctcatctttggaaaacaaggcacaggaactaccaatgtggacattgaatcagtgcttattacagacgaagaagaaatcagaacgactaatcctgtggctacagaacaatacggacaggttgccaccaaccgtcagagtcagaacaccacagcttcctatggaagtgtggacagccagggaatcttacctggaatggtgtggcaggaccgcgatgtctatcttcaaggtcccatttgggccaaaactcctcacacggacggacactttcatccttctccgctcatgggaggctttggactgaaacaccctcctccccagatcctgatcaaaaacacacctgtgccagcgaatcccgcgaccactttcactcctggaaagtttgcttcgttcattacccagtattccaccggacaggtcagcgtggaaatagagtgggagctgcagaaagaaaacagcaaacgctggaacccggaaattcagtacacctccaactacaacaagtcggtgaatgtggagtttaccgtggacgcaaacggtgtttattctgaaccccgccctattggcactcgttaccttacccggaacttgtaatttcctgttaatgaataaaccgatttatgcgtttcagttgaactttggtctctgcgaagggcgaattc

SEQ ID NO: 134 - protein, 735 aa, Artificial Sequence
  Description of Artificial Sequence: Synthetic polypeptide
MAADGYLPDWLEDTLSEGIRQWWKLKPGPPPPKPNQQHRDDSRGLVLPGYKYLGPFNGLDKGEPVNEADAAALEHDKAYDHQLKQGDNPYLKYNHADAEFQERLQEDTSFGGNLGRAVFQAKKRVLEPLGLVEEAVKTAPGKKRPIEQSPAEPDSSSGIGKSGQQPAKKRLNFGQTGDTESVPDPQPIGEPPAAPSGVGSNTMASGGGAPMADNNEGADGVGNSSGNWHCDSTWMGDRVITTSTRTWALPTYNNHLYKQISSESGATNDNHYFGYSTPWGYFDFNRFHCHFSPRDWQRLINNNWGFRPKKLNFKLFNIQVKEVTQNDGTTTIANNLTSTVQVFTDSEYQLPYVLGSAHQGCLPPFPADVFMIPQYGYLTLNNGSQAVGRSSFYCLEYFPSQMLRTGNNFTFSYTFEDVPFHSSYAHSQSLDRLMNPLIDQYLYYLSKTQGTSGTTQQSRLQFNQAGPSSMAQQAKNWLPGPSYRQQRMSKTANDNNNSEFAWTAATKYYPNGRNSLVNPGPPMASHKDDEEKYFPMHGNLIFGKQGTGTTNVDIESVLITDEEEIRTTNPVATEQYGQVATNRQSQNTTASYGSVDSQGILPGMVWQDRDVYLQGPIWAKTPHTDGHFHPSPLMGGFGLKHPPPQILIKNTPVPANPATTFTPGKFASFITQYSTGQVSVEIEWELQKENSKRWNPEIQYTSNYNKSVNVEFTVDANGVYSEPRPIGTRYLTRNL

SEQ ID NO: 135 - DNA, 3122 bp, Adeno-associated virus
agcggccgcgaattcgccctttctacggctgcgtcaactggaccaatgaaaactttcccttcaacgattgcgtcgacaagatggtgatctggtgggaggagggaaagatgaccgccaaggtcgtggaatctgccaaagccattctgggtggaagcaaggttcgtgtggaccagaaatgcaggtcttcggcccagatcgacccgactccggtgattgtcacctctaacaccaacatgtgcgccgtgattgacggaaactcgaccaccttcgagcaccagcagccgttgcaagaccggatgttcaaatttgaacttacccgccgtttggatcatgactttgggaaggtcaccaagcaggaagtcaaagactttttccggtgggctcaagatcacgtgactgaggtggagcatgagttctacgtcaaaaagggtggagccaagaaaaggcccgcccccgatgatgtatatataaatgagcccaagcgggcgcgcgagtcagttgcgcagccatcgacgtcagacgcggaagcttcgataaactacgcggacaggtaccaaaacaaatgttctcgtcacgtgggcatgaatctgatgctgtttccctgtcgacaatgcgaaagaatgaatcagaattcaaatatctgcttcacacacgggcaaaaagactgtttggaatgctttcccgtgtcagaatctcaacccgtttctgtcgtcagaaaaacgtatcagaaactttgttacattcatcatatcatgggaaaagtaccagacgcctgcactgcctgcgacctggtaaatgtggacttggatgactgtatttctgagcaataaatgacttaaatcaggtatggctgctgacggttatcttccagattggctcgaggacactctctctgaaggaatcagacagtggtggaagctcaaacctggcccaccaccgccgaaacctaaccaacaacaccgggacgacagtaggggtcttgtgcttcctgggtacaagtacctcggacccttcaacggactcgacaaaggagagccggtcaacgaggcagacgccgcggccctcgagcacgacaaagcctacgaccaccagctcaagcaaggggacaacccgtacctcaaatacaaccacgcggacgctgaatttcaggagcgtcttcaagaagatacgtctttcgggggcaacctcgggcgagcagtcttccaggccaaaaagagggtactcgagcctcttggtctggttgaggaagctgttaagacggctcctggaaaaaagagacctatagagcagtctcctgcagaaccggactcttcctcgggcatcggcaaatcaggccagcagcccgctaagaaaagactcaattttggtcagactggcgacacagagtcagtcccagaccctcaaccaatcggagaaccccccgcagccccctctggtgtgggatctaatacaatggcttcaggcggtggggcaccaatggcagacaataacgaaggcgccgacggagtgggtaattcctcgggaaattggcattgcgattccacatggatgggcgacagagttatcaccaccagcacaagaacctgggccctccccacctacaataatcgcctctacaagcaaatctccagcgaatcgggagccaccaacgacaaccactacttcggctacagcaccccctgggggtattttgactttaacagattccactgtcacttctcaccacgtgactggcagcgactcatcaacaacaactggggatttagacccaagaaactcaatttcaagctcttcaacatccaagtcaaggaggtcacgcagaatgatggaaccacgaccatcgccaataaccttaccagcacggtgcaggtcttcacagactctgagtaccagctgccctacgtcctcggttcggctcaccagggctgccttccgccgttcccagcagacgtcttcatgattcctcagtacggctacttgactctgaacaatggcagccaagcggtaggacgttcttcattctactgtctagagtattttccctctcagatgctgaggacgggaaacaacttcaccttcagctacacttttgaagacgtgcctttccacagcagctacgcgcacagccagagtctggatcggctgatgaatcctctcattgaccagtacctgtattacctgagcaaaactcagggtacaagtggaacaacgcagcaatcgagactgcagttcagccaagctgggcctagctccatggctcagcaggccaaaaactggctaccgggacccagctaccgacagcagcgaatgtctaagacggctaatgacaacaacaacagtgaatttgcttggactgcagccaccaaatattacctgaatggaagaaattctctggtcaatcccgggcccccaatggccagtcacaaggacgatgaggaaaagtatttccccatgcacggaaatctcatctttggaaaacaaggcacaggaactaccaatgtggacattgaatcagtgcttattacagacgaagaagaaatcagaacaactaatcctgtggctacagaacaatacggacaggttgccaccaaccatcagagtcagaacaccacagcttcctatggaagtgtggacagccagggaatcttacctggaatggtgtggcaggaccgcgatgtctatcttcaaggtcccatttgggccaaaactcctcacacggacggacactttcatccttctccgctcatgggaggctttggactgaaacaccctcctccccagatcctgatcaaaaacacacctgtgccagcgaatcccgcgaccactttcactcctggaaagtttgcttcgttcattacccagtattccaccggacaggtcagcgtggaaatagagtgggagctgcagaaagaaaacagcaaacgctggaacccagaaattcagtacacctccaactacaacaagtcggtgaatgtggagtttaccgtggacgcaaacggtgtttattctgaaccccgccctattggcactcgttaccttacccggaacttgtaatttcctgttaatgaataaaccgatttatgcgtttcagttgaactttggtctctgcgaagggcgaattc

SEQ ID NO: 136 - protein, 735 aa, Artificial Sequence
  Description of Artificial Sequence: Synthetic polypeptide
MAADGYLPDWLEDTLSEGIRQWWKLKPGPPPPKPNQQHRDDSRGLVLPGYKYLGPFNGLDKGEPVNEADAAALEHDKAYDHQLKQGDNPYLKYNHADAEFQERLQEDTSFGGNLGRAVFQAKKRVLEPLGLVEEAVKTAPGKKRPIEQSPAEPDSSSGIGKSGQQPAKKRLNFGQTGDTESVPDPQPIGEPPAAPSGVGSNTMASGGGAPMADNNEGADGVGNSSGNWHCDSTWMGDRVITTSTRTWALPTYNNRLYKQISSESGATNDNHYFGYSTPWGYFDFNRFHCHFSPRDWQRLINNNWGFRPKKLNFKLFNIQVKEVTQNDGTTTIANNLTSTVQVFTDSEYQLPYVLGSAHQGCLPPFPADVFMIPQYGYLTLNNGSQAVGRSSFYCLEYFPSQMLRTGNNFTFSYTFEDVPFHSSYAHSQSLDRLMNPLIDQYLYYLSKTQGTSGTTQQSRLQFSQAGPSSMAQQAKNWLPGPSYRQQRMSKTANDNNNSEFAWTAATKYYLNGRNSLVNPGPPMASHKDDEEKYFPMHGNLIFGKQGTGTTNVDIESVLITDEEEIRTTNPVATEQYGQVATNHQSQNTTASYGSVDSQGILPGMVWQDRDVYLQGPIWAKTPHTDGHFHPSPLMGGFGLKHPPPQILIKNTPVPANPATTFTPGKFASFITQYSTGQVSVEIEWELQKENSKRWNPEIQYTSNYNKSVNVEFTVDANGVYSEPRPIGTRYLTRNL

SEQ ID NO: 137 - DNA, 3121 bp, Adeno-associated virus
gaattcgcccttcgcagagaccaaagttcaactgaaacgaatcaaccggtttattgattaacaagcaattacagattacgggtgaggtaacgggtgccgatggggcgaggctcagaataagtgccatctgtgttaacagcaaagtccacatttgtagatttgtagtagttggaagtgtattgaatctctgggttccagcgtttgctgttttctttctgcagctcccattcaatttccacgctgacctgtccggtgctgtactgcgtgatgaacgacgccagcttagcttgactgaaggtagttggaggatccgcgggaacaggtgtattcttaatcaggatctgaggaggcgggtgtttcagtccaaagccccccatcagcggcgagggatgaaagtttccgtccgtgtgaggaatcttggcccagataggaccctgcaggtacacgtcccggttctgccagaccatgccaggtaaggctccttgactgttgacggcccctacaataggagcggcgttttgctgttgcaggttatcggccaccacgccgtactgttctgtggccactgggttggtggttttaatttcttcctcactggttagcataacgctgctatagtccacgttgccttttccagctccctgtttcccaaacattaagactccgctggacggaaaaaatcgctcttcgtcgtccttgtgggttgccatagcgacaccgggatttaccagagagtctctgccattcagatgatacttggtggcaccggtccaggcaaagttgctgttgttattttgcgacagtgtcgtggagacgcgttgctgccggtagcagggcccgggtagccagtttttggcctgagccgacatgttattaggcccggcctgagaaaatagcaactgctgagttcctgcggtacctcccgtggactgagtccgagacaggtagtacaggtactggtcgatgagggggttcatcagccggtccaggctttggctgtgcgcgtagctgctgtgaaaaggcacgtcctcaaactggtagctgaactcaaagttgttgcccgttctcagcatttgagaaggaaagtactccaggcagtagaaggaggaacggcccacggcctgactgccattgttcagagtcaggtacccgtactgaggaatcatgaagacgtccgccgggaacggaggcaggcagccctggcgcgcagagccgaggacgtacgggagctggtattccgagtccgtaaagacctgaatcgtgctggtaaggttattggcgatggtcttggtgccttcattctgcgtgacctccttgacctggatgttgaagagcttgaagttgagtctcttgggccggaatccccagttgttgttgatgagtcgctgccagtcacgtggtgagaagtggcagtggaatctgttaaagtcaaaatacccccagggggtgctgtagccgaagtaggtgttgtcgttggtgcttcctcccgaagtcccgttggagatttgcttgtagaggtggttgttgtaggtggggagggcccaggttcgggtgctggtggtgatgactctgtcgcccagccatgtggaatcgcaatgccaatttcctgaggaactacccactccgtcggcgccttcgttattgtctgccattggagcgccaccgcctgcagccattgtaccagatcccagaccagaggggcctgcggggggttctccgattggttgagggtcgggcactgactctgagtcgccagtctgcccaaagttgagtctctttttcgcgggctgctggcctttcttgccgatgcccgtagtggagtctggagaacgctggggtgatggctctaccggtctcttctttccaggagccgtcttagcgccttcctcaaccagaccgagaggttcgagaacccgcttcttggcctggaagactgctcgtccgaggttgcccccaaaagacgtatcttcttgcagacgctcctgaaactcggcgtcggcgtggttataccgcaggtacggattgtcacccgctttgagctgctggtcgtaggccttgtcgtgctcgagggccgctgcgtccgccgcgttgacgggctcccccttgtcgagtccgttgaagggtccgaggtacttgtagccaggaagcaccagaccccggccgtcgtcctgcttttgctggttggctttgggcttcggggctccaggtttcagcgcccaccactcgcgaatgccctcagagaggttgtcctcgagccaatctggaagataaccatcggcagccatacctgatctaaatcatttattgttcaaagatgcagtcatccaaatccacattgaccagatcgcaggcagtgcaagcgtctggcacctttcccatgatatgatgaatgtagcacagtttctgatacgcctttttgacgacagaaacgggttgagattctgacacgggaaagcactctaaacagtctttctgtccgtgagtgaagcagatatttgaattctgattcattctctcgcattgtctgcagggaaacagcatcagattcatgcccacgtgacgagaacatttgttttggtacctgtccgcgtagttgatcgaagcttccgcgtctgacgtcgatggctgcgcaactgactcgcgcacccgtttgggctcacttatatctgcgtcactgggggcgggtcttttcttggctccaccctttttgacgtagaattcatgctccacctcaaccacgtgatcctttgcccaccggaaaaagtctttgacttcctgcttggtgaccttcccaaagtcatgatccagacggcgggtgagttcaaatttgaacatccggtcttgcaacggctgctggtgttcgaaggtcgttgagttcccgtcaatcacggcgcacatgttggtgttggaggtgacgatcacgggagtcgggtctatctgggccgaggacttgcatttctggtccacgcgcaccttgcttcctccgagaatggctttggccgactccacgaccttggcggtcatcttcccctcctcccaccagatcaccatcttgtcgacacagtcgttgaagggaaagttctcattggtccagttgacgcagccgtagaagggcgaattc

SEQ ID NO: 138 - protein, 733 aa, Artificial Sequence
  Description of Artificial Sequence: Synthetic polypeptide
MAADGYLPDWLEDNLSEGIREWWDLKPGAPKLKANQQKQDDGRGLVLPGYKYLGPFHGLDKGEPVNAADAAALEHDKAYDQQLKAGDNPYLRYNHADAEFQERLQEDTSFGGNLGRAVFQAKKRVLEPLGLVEEGAKTAPGKKRPLESPQEPDSSSGIGKKGKQPAKKRLNFEEDTGAGDGPPEGSDTSAMSSDIEMRAAPGGNAVDAGQGSDGVGNASGDWHCDSTWSEGKVTTTSTRTWVLPTYNNHLYLRLGTTSNSNTYNGFSTPWGYFDFNRFHCHFSPRDWQRLINNNWGLRPKAMRVKIFNIQVKEVTTSNGETTVANNLTSTVQIFADSSYELPYVMDAGQEGSLPPFPNDVFMVPQYGYCGIVTGENQNQTDRNAFYCLEYFPSQMLRTGNNFEMAYNFEKVPFHSMYAHSQSLDRLMNPLLDQYLWHLQSTTSGETLNQGNAATTFGKIRSGDFAFYRKNWLPGPCVKQQRFSKTASQNYKIPASGGNALLKYDTHYTLNNRWSNIAPGPPMATAGPSDGDFSNAQLIFPGPSVTGNTTTSANNLLFTSEGEIAATNPRDTDMFGQIADNNQNATTAPITGNVTAMGVLPGMVWQNRDIYYQGPIWAKIPHADGHFHPSPLIGGFGLKHPPPQIFIKNTPVPANPATTFTAARVDSFITQYSTGQVAVQIEWEIEKERSKRRNPEVQFTSNYGNQSSMLWAPDTTGKYTEPRVIGSRYLTNHL

SEQ ID NO: 139 - protein, 735 aa, Adeno-associated virus
MAADGYLPDWLEDTLSEGIRQWWKLKPGPPPPKPNQQHRDDSRGLVLPGYKYLGPFNGLDKGEPVNEADAAALEHDKAYDHQLKQGDNPYLKYNHADAEFQERLQEDTSFGGNLGRAVFQAKKRVLEPLGLVEEAVKTAPGKKRPIEQSPAEPDSSSGIGKSGQQPAKKRLNFGQTGDTESVPDPQPIGEPPAAPSGVGSNTMASGGGAPMADNNEGADGVGNSSGNWHCDSTWMGDRVITTSTRTWALPTYNNHLYKQISSESGATNDNHYFGYSTPWGYFDFNRFHCHFSPRDWQRLINNNWGFRPKKLNFKLFNIQVKEVTQNDGTTTIANNLTSTVQVFTDSEYQLPYVLGSAHQGCLPPFPADVFMIPQYGYLTLNNGSQAVGRSSFYCLEYFPSQMLRTGNNFTFSYTFEDVPFHSSYAHSQSLDRLMNPLIDQYLYYLSKTQGTSGTTQQSRLQFSQAGPSSMAQQAKNWLPGPSYRQQRMSKTANDNNNSEFAWTAATKYYLNGRNSLVNPGPPMASHKDDEEKYFPMHGNLIFGKQGTGTTNVDIESVLITDEEEIRTTNPVATEQYGQVATNHQSQNTTASYGSVDSQGILPGMVWQDRDVYLQGPIWAKIPHTDGHFHPSPLMGGFGLKHPPPQILIKNTPVPANPATTFTPGKFASFITQYSTGQVSVEIEWELQKENSKRWNPEIQYTSNYNKSVNVEFTVDANGVYSEPRPIGTRYLTRNL

SEQ ID NO: 140 - DNA, 3127 bp, Adeno-associated virus
gcggccgcgaattcgcccttcgcagagaccaaagttcaactgaaacgaatcaaccggtttattgattaacatgcaattacagattacgggtgaggtaacgagtgccaatagggcgaggctcagagtaaacaccctggctgtcaacggcaaagtccacaccagtctgcttttcaaagttggaggtgtactgaatctccgggtcccagcgcttgctgttttccttctgcagctcccactcgatttccacgctgacttgtccggtgctgtactgtgtgatgaacgaagcaaacttggcaggagtaaacacctccggaggattagcgggaacgggagtgttcttgatcaggatctgaggaggcggatgtttaagtccaaagccgcccatcaaaggagacgggtgaaagttgccatccgtgtgaggaatcttggcccagatgggaccctgcaggtacacgtcccggttctgccagaccatgccaggtaaggctccctggttgttgacaacttgtgtctgggctgcagtattagccgcttgtaagttgctgctgactatcccgtattcttccgtggctacaggattagtaggacgaatttcttcttcatttgtcattaacacattttccaatgtagttttgttagttgctccagtttttccaaaaatcaggactccgctggatgggaaaaagcggtcctcgtcgtccttgtgagttgccatggcgacgccgggattaaccaacgagtttctgccgttcaggtgatatttggtggcaccagtccaagcaaagttgctgttgttgttttgatccagcgttttggagaccctttgttgccggaagcagggtccaggtaaccaattcttggcttgttcggccatagttgaaggcccgccctggtaaaactgcagttcccgattgccagctgtgcctcctgggtcactctgtgttctggccaggtagtacaagtactggtcgatgaggggattcatcagccggtccaggctctggctgtgtgcgtagctgctgtggaaaggcacgtcctcgaagctgtagctgaactcaaagttgttgcccgttctcagcatctgagaggggaagtactccaggcagtagaaggaggaacgtcccacagactgactgccattgttgagagtcaggtagccgtactgaggaatcatgaagacgtccgccgggaacggaggcaggcagccctggtgcgcagagccgaggacgtacggcagctggtattccgagtccgagaatacctgaatcgtgctggtaaggttattagcgatggtcgtaacgccgtcattcgtcgtgacctccttgacctggatgttgaagagcttgaaccgcagcttcttgggccggaatccccagttgttgttgatgagtcgctgccagtcacgtggtgagaagtggcagtggaatctgttaaagtcaaaatacccccagggggtgctgtagccgaagtaggtgttgtcgttggtactacctgcagtttcactggagatttgctcgtagaggtggttgttgtaggtgggcagggcccaggttcgggtgctggtggtaatgactctgtcgcccagccatgtggaatcgcaatgccaatttcctgaggcattacccactccgtcggcaccttcgttattgtctgccattggtgcgccaccgcctgcagccactgtaccagatcccacactagagggcgctgctggaggttctccgagaggttgagggtcggggactgactctgagtcgccagtctgaccgaaattgagtctctttctggcgggctgctggcccttcttgccgatgcccgtggaggagtcgggggaacgctgaggtgacggctctaccggtctcttctttgcaggagccgtcttagcgccttcctcaaccagaccgagaggttcgagaacccgcttcttggcctggaagactgctcgcccgaggttgcccccaaatgacgtatcttcttgcagacgctcctgaaactcggcgtcggcgtggttataccgcaggtacgggttgtcacccgcattgagctgctggtcgtaggccttgtcgtgctcgagggccgctgcgtccgccgcgttgacgggctcccccttgtcgagtccgttgaagggtccgaggtacttgtagccaggaagcaccagaccccggccgttgtcctgcttttgctggttggctttgggtttcggggctccaggtttcaggtcccaccactcgcgaatgccctcagagaggttgtcctcgagccaatctggaagataaccatcggcagccatacctgatttaaatcatttattgttcaaagatgcagtcatccaaatccacattgaccagatcgcaggcagtgcaagcgtctggcacctttcccatgatatgatgaatgtagcacagtttctgatacgcctttttgacgacagaaacgggtttagattctgacacgggaaagcactctaaacagtctttctgtccgtgagtgaagcagatatttgaattctgattcattctctcgcattgtctgcagggaaacagcatcagattcatgcccacgtgacgagaacatttgttttggtacctgtctgcgtagttgatcgaagcttccgcgtctgacgtcgatggctgcgcaactgactcgcgcacccgtttgggctcacttatatctgcgtcactgggggcgggtcttttcttggctccaccctttttgacgtagaattcatgctccacctcaaccacgtaatcctttgcccaccggaaaaagtctttgacttcctgcttggtgaccttcccaaagtcatgatccagacggcgggtgagttcaaatttgaacatccggtcttgcaacggctgctggtgttcgaaggtcgttgagttcccgtcgatcacggcgcacatgttggtgttggagatgacgatcgcgggagtcgggtctatctgggccgaggacttgcatttctggtccacgcgcaccttgcttcctccgagaatggctttggccgactccacgaccttggcggtcatcttcccctcctcccaccagatcaccatcttgtcgacacagtcgttgaagggaaagttctcattggtccagttgacgcagccgtagaaagggcgaattc

SEQ ID NO: 141 - protein, 728 aa, Artificial Sequence
  Description of Artificial Sequence: Synthetic polypeptide
MAADGYLPDWLEDNLSEGIREWWDLKPGAPKPKANQQKQDDGRGLVLPGYKYLRPFNGLDKGEPVNEADAAALEHDKAYDKQLEQGDNPYLKYNHADAEFQERLQEDTSFGGNLGRAVFQAKKRVLEPLGLVEEVAKTAPGKKRPIESPDSSTGIGKKGQQPAKKKLNFGQTGDSESVPDPQPLGEPPAAPSGLGSGTMAAGGGAPMADNNEGADGVGNASGNWHCDSTWLGDRVITTSTRTWALPTYNNHLYKQISSQSGATNDNHFFSYSTPWGYFDFNRFHCHFSPRDWQRLINNNWGFRPRKLRFKLFNIQVKEVTTNDGVTTIANNLTSTIQVFSDSEYQLPYVLGSAHQGCLPPFPADVFMIPQYGYLTLNNGSQSVGRSSFYCLEYFPSQMLRTGNNFEFSYTFEEVPFHSSYVHSQSLDRLMNPLIDQYLYYLARTQSTTGSTRELQFHQAGPNTMAEQSKNWLPGPCYRQQRLSKNIDSNNNSNFAWTGATKYHLNGRNSLTNPGVAMATNKDDEDQFFPINGVLVFGKTGAANKTTLENVLMTSEEEIKTTNPVATEEYGVVSSNLQSSTAGPQTQTVNSQGALPGMVWQNRDVCLQGPIWAKIPHTDGNFHPSPLMGGFGLKHPPPQILIKNTPVPANPPEVFTPAKFASFITQYSTGQVSVEIEWELQKENSKRWNPEIQYTSNYAKSNNVEFAVNNEGVYTEPRPIGTRYLTRNL

SEQ ID NO: 142 - DNA, 3106 bp, Adeno-associated virus
gcggccgcgaattcgcccttcgcagagaccaaagttcaactgaaacgaatcaaccggtttattgattaacaagtaattacaggttacgggtgaggtaacgggtgccaatggggcgaggctcagtataaaccccttcgttgttgacagcaaattccacattattagacttggcataatttgaggtgtactgaatctctggattccagcgtttgctgttttctttctgcagttcccactcgatctccacgctgacctggccggtgctgtactgcgtgataaatgaggcaaacttggcaggagtaaacacctctggaggattagcaggtaccggggtgtttttgatgagaatttgaggaggcgggtgtttgagtccaaatccgcccatcaggggagacgggtgaaagttgccgtccgtgtgaggaattttggcccagatgggaccctgcaggcacacgtcccggttctgccagaccatgccgggcagagccccctggctgttgacagtctgtgtctggggtccggccgtagacgattgcaggttgctggagaccacaccgtattcttctgtagccacgggattggtggttttgatctcctcctcgctggtcattagcacgttttccagcgttgtcttgttggcagcccccgttttgccaaaaaccagcactccgttgatgggaaagaactggtcctcgtcgtccttgttggtggccatggctacgcccgggttggttaatgaatttctaccattcagatggtatttagtggccccggtccaggcaaagttactgttgttgttgctgtctatgttttttgacagtctctgctgccgataacagggtccgggcagccagttctttgattgctcggccatggtgttgggcccagcctgatggaactgcagctcccttgtggaccccgtagtgctctgggtccgggccaggtagtacaggtactggtcgatgaggggattcatcagccggtctaggctctggctgtgcacatagctgctgtggaaaggcacttcctcaaaggtgtagctgaattcaaagttattgcccgttctcagcatctgagaaggaaagtactccaggcagtagaaggaggaacgtcccacagactgactgccgttgtttagagtcagatatccgtactgaggaatcatgaacacgtccgcagggaacggagggaggcagccctggtgcgcagagccgaggacgtacggcagttggtactccgagtccgagaagacctgaatcgtgctggtaaggttattagcgatggtcgtaacgccgtcgttcgtcgtgacctccttgacctggatgttgaacaacttgaaccgcagctttctgggccggaatccccagttgttgttgatgagtcgctgccagtcacgtggtgagaagtggcagtggaatctgttgaagtcaaaatagccccagggggtgctgtagctgaagaagtggttgtcgttggtagccccgctctgacttgatatctgcttgtagaggtggttgttgtaggtgggcagggcccaggtgcgggtgctggtggtgatgactctgtcgcccagccatgtggaatcgcaatgccaatttccggaggcattacccactccgtcggcgccttcgttattgtctgccattggtgcgccaccgcctgcagccattgtaccagatcccagacctgagggcgcggcgggaggttctccgagaggttgggggtcgggcactgactctgagtcgccagtctgcccaaagttgagcttctttttagcgggctgctggcctttcttgccgatgcccgtggaggagtcgggggattctatgggtctcttctttccaggagccgtcttagcgacttcctcaaccagaccgagaggttcgagaacccgcttcttggcctggaagactgctcgcccgaggttgcccccaaaagacgtatcttcttgaagacgctcctgaaactcggcgtcggcgtggttgtacttgaggtacgggttgtccccctgctcgagctgcttgtcgtaggccttgtcgtgctcgagggccgcggcgtctgcctcgttgaccggctctcccttgtcgagtccgttgaagggtctgaggtacttgtagccaggaagcaccagaccccggccgtcgtcctgcttttgctggttggctttgggtttcggggctccaggtttcaagtcccaccactcgcgaatgccctcagagaggttgtcctcgagccaatctggaagataaccatcggcagccatacctggtttaagtcatttattgctcagaaacacagtcatccaggtccacgttgaccagatcgcaggccgagcaagcaatctcgggagcccgccccagcagatgatgaatggcacagagtttccgatacgtcctctttctgacgaccggttgagattctgacacgccggggaaacattctgaacagtctctggtcccgtgcgtgaagcaaatgttgaaattctgattcactctctcgcatgtcttgcagggaaacagcatctgaagcatgcccgcgtgacgagaacatttgttttggtacctgtcggcaaagtccaccggagctccttccgcgtctgacgtcgatggattcgcgactgaggggcaggcccgcttgggctcgcttttatccgcgtcatcgggggcgggtctcttgttggccccaccctttctgacgtagaacccatgcgccacctcggtcacgtgatcctgcgcccagcggaagaaccttttgacttcctgctttgtcaccttgccaaagttatgctccagacggcgggtgggttcaaatttgaacatccggtcctgcaacggctgctggtgctcgaaggtggcgctgttcccgtcaatcacggcgcacatgttggtgttggaggtgacggtcacgggggtggggtcgatctgggcggacgacttgcacttttggtccacgcgcaccttgctgccgccgagaatggccttggcggactccacgaccttggccgtcatcttgccctcctcccaccagatcaccatcttgtcggcgcaatcgttgaagggaaagttctcattggtccagttgacgcagccgtagaaagggcgaattc

SEQ ID NO: 143 - protein, 728 aa, Artificial Sequence
  Description of Artificial Sequence: Synthetic polypeptide
MAADGYLPDWLEDNLSEGIREWWDLKPGAPKPKANQQKQDDGRGLVLPGYKYLGPFNGLDKGEPVNEADAAALEHDKAYDKQLEQGDNPYLKYNHADAEFQERLQEDTSFGGNLGRAVFQAKKRVLEPLGLVEEGAKTASGKKRPIESPDSSTGIGKKGQQPAKKKLNFGQTGDSESVPDPQPLGEPPAAPSGLGSGTMAAGGGAPMADNNEGADGVGNASGNWHCDSTWLGDRVITTSTRTWALPTYNNHLYKQISSQSGATNDNHFFGYSTPWGYFDFNRFHCHFSPRDWQRLINNNWGFRPRKLRFKLFNIQVKEVTTNDGVTTIANNLTSTIQVFSDSEYQLPYVLGSAHQGCLPPFPADVFMIPQYGYLTLNNGSQSVGRSSFCCLEYFPSQMLRTGNNFEFSYTFEEVPFHSSYAHSQSLDRLMNPLIDQYLYYLARTQSTTGSTRELQFHQAGPNTVAEQSKNWLPGPCYRQQRLSKNIDSNNNSNFAWTGATKYHLNGRNSLTNPGVAMATNKDDEDQFLPINGVLVFGKTGAANKTTLENVLMTSEEEIKTTNPVATEEYGVVSSNLQSSTAGPRTQTVNSQGALPGMVWQNRDVYLQGPIWAEIPHTDGNFHPSPLMGGFGLKHPPPQILIKNTPVPANPPEVFTPAKFASFITQYSTGQVSVEIEWELQKENSKRWNPEIQYTSNYAKSNNVEFAVNNEGVYTEPRPIGTRYLTRNL

SEQ ID NO: 144 - DNA, 3102 bp, Adeno-associated virus
gcggccgcgaattcgcccttcgcagagaccaaagttcaactgaaacgaatcaaccggtttattgattaacaagtaattacaggttacgggtgaggtaacgggtgccaatggggcgaggctcagtataaaccccttcgttgttgacagcaaattccacattattagacttggcataatttgaggtgtactgaatctctggattccagcgtttgctgttttctttctgcagttcccactcgatctccacgctgacctggccggtgctgtactgcgtgataaatgaggcaaacttggcaggagtaaacacctctggaggattagcaggtaccggggtgtttttgatgagaatttgaggaggcgggtgtttgagtccaaatccgcccatcaggggagacgggtgaaagttgccgtccgtgtgaggaatttcggcccagatgggaccctgcaggtacacgtcccggttctgccagaccatgccgggcagagccccctggctgttgacagtctgtgtccggggtccggccgtagacgattgcaggttgctggagaccacaccgtattcttctgtagccacgggattggtggttttgatctcctcctcgctggtcattagcacgttttccagcgttgtcttgttggcagcccccgttttgccaaaaaccagcactccgttgatgggaaggaactggtcctcgtcgtccttgttggtggccatggctacgcccgggttggttaatgaatttctaccattcagatggtatttagtggccccggtccaggcaaagttactgttgttgttgctgtctatgttttttgacagtctctgctgccgataacagggtccgggcagccagttctttgattgctcggccacggtgttgggcccagcctgatggaactgcagctcccttgtggaccccgtagtgctctgggtccgggccaggtagtacaggtactggtcgatgaggggattcatcagccggtccaggctctggctgtgcgcatagctgctgtggaaaggcacttcctcaaaggtgtagctgaattcaaagttattgcccgttctcagcatctgagaaggaaagtactccaggcagcagaaggaggaacgtcccacagactgactgccgttgtttagagtcagatatccgtactgaggaatcatgaacacgtccgcagggaacggagggaggcagccctggtgcgcagagccgaggacgtacggcagttggtactccgagtccgagaagacctgaatcgtgctggtaaggttattagcgatggtcgtaacgccgtcgttcgtcgtgacctccttgacctggatgttgaacaacttgaaccgcagctttctgggccggaatccccagttgttgttgatgagtcgctgccagtcacgtggtgagaagtggcagtggaatctgttgaagtcaaaatagccccagggggtgctgtagccgaagaagtggttgtcgttggtagccccgctctgacttgatatctgcttgtagaggtggttgttgtaggtgggcagggcccaggtgcgggtgctggtggtgatgactctgtcgcccagccatgtggaatcgcaatgccaatttccggaggcattacccactccgtcggcgccttcgttattgtctgccattggtgcgccaccgcctgcagccattgtaccagatcccagacctgagggcgcggcgggaggttctccgagaggttgggggtcgggcactgactctgagtcgccagtctgcccaaagttgagcttctttttagcgggctgctggcctttcttgccgatgcccgtggaggagtcgggggattctatgggtctcttctttccggaagccgtcttagcgccttcctcaaccagaccgagaggttcgagaacccgcttcttggcctggaagactgctcgcccgaggttgcccccaaaagacgtatcttcttgaagacgctcctgaaactcggcgtcggcgtggttgtacttgaggtacgggttgtccccctgctcgagctgcttgtcgtaggccttgtcgtgctcgagggccgcggcgtctgcctcgttgaccggctctcccttgtcgagtccgttgaagggtccgaggtacttgtagccaggaagcaccagaccccggccgtcgtcctgcttttgctggttggctttgggtttcggggctccaggtttcaagtcccaccactcgcgaatgccctcagagaggttgtcctcgagccaatctggaagataaccatcggcagccatacctggtttaagtcatttattgctcagaaacacagtcatccaggtccacgttgaccagatcgcaggccgagcaagcaatctcgggagcccgccccagcagatgatgaatggcacagagtttccgatacgtcctctttctgacgaccggttgagattctgacacgccggggaaacattctgaacagtctctggtcccgtgcgtgaagcaaatgttgaaattctgattcattctctcgcatgtcttgcagggaaacagcatctgaagcatgcccgcgtgacgagaacatttgttttggtacctgtcggcaaagtccaccggagctccttccgcgtctgacgtcgatggatccgcgactgaggggcaagcccgcttgggctcgcttttatccgcgtcatcgggggcgggtctcttgttggctccaccctttctgacgtagaactcatgcgccacctcggtcacgtgatcctgcgcccagcggaagaactctttgacttcctgctttgtcaccttgccaaagtcatgctccagacggcgggtgagttcaaatttgaacatccggtcttgtaacggctgctggtgctcgaaggtggtgctgttcccgtcaatcacggcgcacatgttggtgttggaagtgacgatcacgggggtgggatcgatctgggcggacgacttgcacttttggtccacgcgcaccttgctgccgccgagaatggccttggcggactccacgaccttggccgtcatcttgccctcctcccaccagatcaccatcttgtcgacgcaatcgttgaagggaaagttctcattggtccagttgacgcagccgaagggcgaattc

SEQ ID NO: 145 - protein, 728 aa, Adeno-associated virus
MAADGYLPDWLEDNLSEGIREWWDLKPGAPKPKANQQKQDDGRGLVLPGYRYLGPFNGLDKGEPVNEADAAALEHDKAYDKQLEQGDNPYLKYNHADAEFQERLQEDTSFGGNLGRAVFQAKKRVLEPLGLVEEGAKTAPGKKRPIESPDSSTGIGKNGQPPAKKKLNFGQTGDSESVPDPQPLGEPPAAPSGLGSGTMAAGGGAPMADNNEGADGVGNASGNWHCDSTWLGDRVITTSTRTWALPTYNNHLYKQISSQSGATNDNHFFGYSTPWGYFDFNRFHCHFSPRDWQRLINNNWGFRPRKLRFKLFNIQVKEVTTNDGVTTIANNLTSTIQVFSDSEYQLPYVLGSAHQGCLPPFPADVFMIPQYGYLTLNNGSQSVGRSSFYCLEYFPSQMLRTGNNFEFSYTFEEVPFHSSYAHSQSLDRLMNPLIDQYLYYLARTQSTTGSTRELQFHQAGPNTMAEQSKNWLPGPCYRQQRLSKNIDSNNNSNFAWTGATKYHLNGRNSLTNPGVAMATNKDDEDQFFPINGVLVFGKTGAANKTTLENVLMTSEEEIKTTNPVATEEYGVVSSNLQSSTAGPQTQTVNSQGALPGMVWQNRDVYLQGPIWAKIPHTDGNFHPSPLMGGFGLKHPPPQILIKNTPVPANPPEVFTPAKFASFITQYSTGQVSVEIEWELQKENSKRWNPEIQYTSNYAKSNNVEFAVNNEGVYTEPRPIGTRYLTRNL

SEQ ID NO: 146 - protein, 728 aa, Artificial Sequence
  Description of Artificial Sequence: Synthetic polypeptide
MAADGYLPDWLEGNLSEGIREWWDLKPGAPKPKANQQKQDDGRGLVLPGYRYLGPFNGLDKGEPVNEADAAALEHDKAYDKQLEQGDNPYLKYNHADAEFQERLQEDTSFGGNLGRAVFQAKKRVLEPLGLVEEGAKTAPGKKRPIESPDSSTGIGKNGQPPAKKKLNFGQTGDSESVPDPQPLGEPPAAPSGLGSGTMAAGGGAPMADNNEGADGVGNASGNWHCDSTWLGDRVITTSTRTWALPTYNNHLYKQISSQSGATNDNHFFGYSTPWGYFDFNRFHCHFSPRDWQRLINNNWGFRPRKLRFKLFNIQVKEVTTNDGVTTIANNLTSTIQVFSDSEYQLPYVLGSAHQGCLPPFPADVFMIPQYGYLTLNNGSQSVGRSSFYCLEYFPSQMLRTGDNFEFSYTFEEVPFHSSYAHSQSLDRLMNPLIDQYLYYLARTQSTTGSTRELQFHQAGPNTMAEQSKNWLPGPCYRQQRLSKNIDSNNNSNFAWTGATKYHLNGRNSLTNPGVAMATNKDDEDQFFPINGVLVFGKTGAANKTTLENVLMTSEEEIKTTNPVATEEYGVVSSNLQSSTAGPQTQTVNSQGALPGMVWQNRDVYLQGPIWAKIPHTDGNFHPSPLMGGFGLKHPPPQILIKNTPVPANPPEVFTPAKFASFITQYSTGQVSVEIEWELQKENSKRWNPEIQYTSNYAKSNNVEFAVNNEGVYTEPRPIGTRYLTRNL

SEQ ID NO: 147 - DNA, 3106 bp, Adeno-associated virus
gcggccgcgaattcgcccttcgcagagaccaaagttcaactgaaacgaatcagccggtttattgattaacaagtaattacaggttacgggtgaggtaacgggtgccaatggggcgaggctcagtataaaccccttcgttgttgacagcaaattccacattattagacttggcataatttgaggtgtactgaatctctggattccagcgtttgctgttttctttctgcagttcccactcgatctccacgctgacctggccggtgctgtactgcgtgataaatgaggcaaacttggcaggagtaaacacctctggaggattagcaggtaccggggtgtttttgatgagaatttgaggaggcgggtgtttgagtccaaatccgcccatcaggggagacgggtgaaagttgccgtccgtgtgaggaattttggcccagatgggaccctgcaggtacacgtcccggttctgccagaccatgccgggcagagccccctggctgttgacagtctgtgtctggggtccggccgtagacgattgcaggttgctggagaccacaccgtattcttctgtagccacgggattggtggttttgatctcctcctcgctggtcattagcacgttttccagcgttgtcttgttggcagcccccgttttgccaaaaaccagcactccgttgatgggaaagaactggtcctcgtcgtccttgttggtggccatggctacgcccgggttggttaatgaatttctaccattcagatggtatttagtggccccggtccaggcaaagttactgttgttgttgctgtctatgttttttgacagtctctgctgccgataacagggtccgggcagccagttctttgattgctcggccatggtgttgggcccagcctgatggaactgcagctcccttgtggaccccgtagtgctctgggtccgggccaggtagtacaggtactggtcgatgaggggattcatcagccggtccaggctctggctgtgcgcatagctgctgtggaaaggcacttcctcaaaggtgtagctgaattcaaagttatcgcccgttctcagcatctgagaaggaaagtactccaggcagtagaaggaggaacgtcccacagactgactgccgttgtttagagtcagatatccgtactgaggaatcatgaacacgtccgcagggaacggagggaggcagccctggtgcgcagagccgaggacgtacggcagttggtactccgagtccgagaagacctgaatcgtgctggtaaggttattagcgatggtcgtaacgccgtcgttcgtcgtgacctccttgacctggatgttgaacaacttgaaccgcagctttctgggccggaatccccagttgttgttgatgagtcgctgccagtcacgtggtgagaagtggcagtggaatctgttgaagtcaaaatagccccagggggtgctgtagccgaagaagtggttgtcgttggtagccccgctctgacttgatatctgcttgtagaggtggttgttgtaggtgggcagggcccaggtgcgggtgctggtggtgatgactctgtcgcccagccatgtggaatcgcaatgccaatttccggaggcattacccactccgtcggcgccttcgttattgtctgccattggtgcgccaccgcctgcagccattgtaccagatcccagacctgagggcgcggcgggaggttctccgagaggttgggggtcgggcactgactctgagtcgccagtctgcccaaagttgagcttctttttagcgggcggctggccgttcttgccgatgcccgtggaggagtcgggggattctatgggtctcttctttccaggagccgtcttagcgccttcctcaaccagaccgagaggttcgagaacccgcttcttggcctggaagactgctcgcccgaggttgcccccaaaagacgtatcttcttgaagacgctcctgaaactcggcgtcggcgtggttgtacttgaggtacgggttgtccccctgctcgagctgcttgtcgtaggccttgtcgtgctcgagggccgcggcgtctgcctcgttgaccggctctcccttgtcgagtccgttgaagggtccgaggtacctgtagccaggaagcaccagaccccggccgtcgtcctgcttttgctggttggctttgggtttcggggctccaggtttcaagtcccaccactcgcgaatgccctcagagaggttgccctcgagccaatctggaagataaccatcggcagccatacctggtttaagtcatttattgctcagaaacacagtcatccaggtccacgttggccagatcgcaggccgagcaagcaatctcgggagcccgccccagcagatgatgaatggcacagagtttccgatacgtcctctttctgacgaccggttgagattctgacacgccggggaaacattctgaacagtctctggtcccgtgcgtgaagcaaatgttgaaattctgattcattctctcgcatgtcttgcaggggaacagcatctgaagcatgcccgcgtgacgagaacatttgttttggtacctgtcggcaaagtccaccggagctccttccgcgtctgacgtcgatggatccgcgactgaggggcaggcccgcttgggctcgcttttatccgcgtcatcgggggcgggtctcttgttggctccaccctttctgacgtagaactcatacgccacctcggtcacgtgatcctgcgcccagcggaagaactctttgacttcctgctttgtcaccttgccaaagtcatgctccagacggcgggtgagttcaaatttgaacatccggtcttgtaacggctgctggtgctcgaaggtggtgctgttcccgtcaatcacggcgcacatgttggtgttggaagtgacgatcacgggggtgggatcgatctgggcggacgacttgcacttttggtccacgcgcaccttgctgccgccgagaatggccttggcggactccacgaccttggccgtcatcctgccctcctcccaccagatcaccatcttgtcgacgcaatcgttgaagggaaagttctcattggtccagttgacgcagccgtagaaagggcgaattc

SEQ ID NO: 148 - protein, 728 aa, Artificial Sequence
  Description of Artificial Sequence: Synthetic polypeptide
MAADGYLPDWLEDNLSEGIREWWDLKPGAPKPKANQQKQDDGRGLVLPGYKYLGPFNGLDKGEPVNEADAAALEHDKAYDKQLEQGDNPYLKYNHADAEFQERLQEDTSFGGNLGRAVFQAKKRVLEPLGLVEEGAKTAPGKKRPIESPDSSTGIGKKGQQPAKKKLNFGQTGDSESVPDPQPLGEPPAAPSGLGSGTMAAGGGAPMADNNEGADGVGNASGNWHCDSTWLGDRVITTSTRTWALPTYNNHLYKQISSQSGATNDNHFFGYSTPWGYFDFNRFHCHFSPRDWQRLINNNWGFRPRKLRFKLFNIQVKEVTTNDGVTTIANNLTSTIQVFSDSEYQLPYVLGSAHQGCLPPFPADVFMIPQYGYLTLNNGSQSMGRSSFYCLEYFPSQMLRTGNNFEFSYTFEEVPFHSSYAHSQSLDRLMNPLIDQYLYYLARTQSTTGSTRELQFHQAGPNTMAEQSKNWLPGPCYRQQRLSKNIDSNNNSNFAWTGATKYHLNGRNSLTNPGVAMATNKDDEGQFFPINGVLVFGKTGAANKTTLENVLMTSEEEIKTTNPVATEEYGVVSSNLQSSTAGPQTQTVNSQGALPGMVWQNRDVYLQGPIWAKIPHTDGNFHPSPLMGGFGLKHPPPQILIKNTPVPANPPGVFTPALFASFITQYSTGQVSVEIEWELQKENSKRWNPEIQYTSNYAKSNNVEFAVNNEGVYTEPRPIGTRYLTRNL

SEQ ID NO: 149 - DNA, 3098 bp, Adeno-associated virus
gaattcgcccttcgcagagaccaaagttcaactgaaacgaatcaaccggtttattgattaacaagtaattacaggttacgggtgaggtaacgggtgccaatggggcgaggctcagtataaaccccttcgttgttgacagcaaattccacattattagacttggcataatttgaggtgtactgaatctctggattccagcgtttgctgttttctttctgcagttcccactcgatctccacgctgacctggccggtgctgtactgcgtgataaatgaggcaaactaggcaggagtaaacacccctggaggattagcaggtaccggggtgtttttgatgagaatttgaggaggcgggtgtttgagtccaaatccgcccatcaggggagacgggtgaaagttgccgtccgtgtgaggaattttggcccagatgggaccctgcaggtacacgtcccggttctgccagaccatgccgggcagagccccctggctgttgacagtctgtgtctggggtccggccgtagacgattgcaggttgctggagaccacaccgtattcttctgtagccacgggattggtggttttgatctcctcctcgctggtcattagcacgttttccagcgttgtcttgttggcagcccccgttttgccaaaaaccagcactccgttgatgggaaagaactggccctcgtcgtccttgttggtggccatggctacgcccgggttggttaatgaatttctaccattcagatggtatttagtggccccggtccaggcaaagttactgttgttgttgctgtctatgttttttgacagtctctgctgccgataacagggtccgggcagccagttctttgattgctcggccatggtgttgggcccagcctgatggaactgcagctcccttgtggaccccgtagtgctctgggtccgggccaggtagtacaggtactggtcgatgaggggattcatcagccggtccaggctctggctgtgcgcatagctgctgtggaaaggcacttcctcaaaggtgtagctgaattcaaagttattgcccgttctcagcatctgagaaggaaagtactccaggcagtagaaggaggaacgtcccatagactgactgccgttgtttagagtcagatatccgtactgaggaatcatgaacacgtccgcagggaacggagggaggcagccctggtgcgcagagccgaggacgtacggcagttggtactccgagtccgagaagacctgaatcgtgctggtaaggttattagcgatggtcgtaacgccgtcgttcgtcgtgacctccttgacctggatgttgaacaacttgaaccgcagctttctgggccggaatccccagttgttgttgatgagtcgctgccagtcacgtggtgagaagtggcagtggaatctgttgaagtcaaaatagccccagggggtgctgtagccgaagaagtggttgtcgttggtagccccgctctgacttgatatctgcttgtagaggtggttgttgtaggtgggcagggcccaggtgcgggtgctggtggtgatgactctgtcgcccagccatgtggaatcgcaatgccaatttccggaggcattacccactccgtcggcgccttcgttattgtctgccattggtgcgccaccgcctgcagccattgtaccagatcccagacctgagggcgcggcgggaggttctccgagaggttgggggtcgggcactgactctgagtcgccagtctgcccaaagttgagcttctttttagcgggctgctggcctttcttgccgatgcccgtggaggagtcgggggattctatgggtctcttctttccaggagccgtcttagcgccttcctcaaccagaccgagaggttcgagaacccgcttcttggcctggaagactgctcgcccgaggttgcccccaaaagacgtatcttcttgaagacgctcctgaaactcagcgtcggcgtggttgtacttgaggtacgggttgtccccctgctcgagctgcttgtcgtaggccttgtcgtgctcgagggccgcggcgtctgcctcgttgaccggctctcccttgtcgagtccgttgaagggtccgaggtacttgtagccaggaagcaccagaccccggccgtcgtcctgcttttgctggttggctttgggtttcggggctccaggtttcaagtcccaccactcgcgaatgccctcagagaggttgtcctcgagccaatctggaagataaccatcggcagccatacctggtttaagtcatttattgctcagaaacacagtcatccaggtccacgttgaccagatcgcaggccgagcaagcaatctcgggagcccgccccagcagatgatgaatggcacagagtttccgatacgtcctctttctgacgaccggttgagattctgacacgccggggaaacattctgaacagtctctggtcccgtgcgtgaagcaaatgttgaaattctgattcattctctcgcatgtcttgcagggaaacagcatctgaagcatgcccgcgtgacgagaacatttgttttggtacctgtcggcaaagtccaccggagctccttccgcgtctgacgtcgatggatccgcgactgaggggcaggcccgcttgggctcgcttttatccgcgtcatcgggggcgggcctcttgttggctccaccctttctgacgtagaactcatgcgccacctcggtcacgtgatcctgcgcccagcggaagaactctttgacttcctgctttgtcaccttgccaaagtcctgctccagacggcgggtgagttcaaatttgaacatccggtcttgtaacggctgctggtgctcgaaggtggtgctgttcccgtcaatcacggcgcacatgttggtgttggaagtgacgatcacgggggtgggatcgatctgggcggacgacttgcacttttggtccacgcgcaccttgctgccgccgagaatggccttggcggactccacgaccttggccgtcatcttgccctcctcccaccagatcaccatcttgtcgacgcaatcgttgaagggaaagttctcattggtccagttgacgcagccgtagaaagggcgaattc

SEQ ID NO: 150 - DNA, 2187 bp, Adeno-associated virus
atggctgccgatggttatcttccagattggctcgagggcaacctctctgagggcattcgcgagtggtgggacttgaaacctggagccccgaaacccaaagccaaccagcaaaagcaggacgacggccggggtctggtgcttcctggctacaggtacctcggacccttcaacggactcgacaagggagagccggtcaacgaggcagacgccgcggccctcgagcacgacaaggcctacgacaagcagctcgagcagggggacaacccgtacctcaagtacaaccacgccgacgccgagtttcaggagcgtcttcaagaagatacgtcttttgggggcaacctcgggcgagcagtcttccaggccaagaagcgggttctcgaacctctcggtctggttgaggaaggcgctaagacggctcctggaaagaagagacccatagaatcccccgactcctccacgggcatcggcaagaacggccagccgcccgctaaaaagaagctcaactttgggcagactggcgactcagagtcagtgcccgacccccaacctctcggagaacctcccgccgcgccctcaggtctgggatctggtacaatggctgcaggcggtggcgcaccaatggcagacaataacgaaggcgccgacggagtgggtaatgcctccggaaattggcattgcgattccacatggctgggcgacagagtcatcaccaccagcacccgcacctgggccctgcccacctacaacaaccacctctacaagcagatatcaagtcagagcggggctaccaacgacaaccacttcttcggctacagcaccccctggggctattttgacttcaacagattccactgccacttctcaccacgtgactggcagcgactcatcaacaacaactggggattccggcccagaaagctgcggttcaagttgttcaacatccaggtcaaggaggtcacgacgaacgacggcgttacgaccatcgctaataaccttaccagcacgattcaggtcttctcggactcggagtaccaactgccgtacgtcctcggctctgcgcaccagggctgcctccctccgttccctgcggacgtgttcatgattcctcagtacggatatctgactctaaacaacggcagtcagtctgtgggacgttcctccttctactgcctggagtactttccttctcagatgctgagaacgggcgataactttgaattcagctacacctttgaggaagtgcctttccacagcagctatgcgcacagccagagcctggaccggctgatgaatcccctcatcgaccagtacctgtactacctggcccggacccagagcactacggggtccacaagggagctgcagttccatcaggctgggcccaacaccatggccgagcaatcaaagaactggctgcccggaccctgttatcggcagcagagactgtcaaaaaacatagacagcaacaacaacagtaactttgcctggaccggggccactaaataccatctgaatggtagaaattcattaaccaacccgggcgtagccatggccaccaacaaggacgacgaggaccagttctttcccatcaacggagtgctggtttttggcaaaacgggggctgccaacaagacaacgctggaaaacgtgctaatgaccagcgaggaggagatcaaaaccaccaatcccgtggctacagaagaatacggtgtggtctccagcaacctgcaatcgtctacggccggaccccagacacagactgtcaacagccagggggctctgcccggcatggtctggcagaaccgggacgtgtacctgcagggtcccatctgggccaaaattcctcacacggacggcaactttcacccgtctcccctgatgggcggatttggactcaaacacccgcctcctcaaattctcatcaaaaacaccccggtacctgctaatcctccagaggtgtttactcctgccaagtttgcctcatttatcacgcagtacagcaccggccaggtcagcgtggagatcgagtgggaactgcagaaagaaaacagcaaacgctggaatccagagattcagtacacctcaaattatgccaagtctaataatgtggaatttgctgtcaacaacgaaggggtttatactgagcctcgccccattggcacccgttacctcacccgtaacctgtaa

SEQ ID NO: 151 - protein, 728 aa, Adeno-associated virus; identical to SEQ ID NO: 146

SEQ ID NO: 152 - protein, 728 aa, Adeno-associated virus
MAADGYLPDWLEDNLSEGIREWWDLKPGAPKPKANQQKQDDGRGLVLPGYRYLGPFNGLDKGEPVNEADAAALEHDKAYDKQLEQGDNPYLKYNHADAEFQERLQEDTSFGGNLGRAVFQAKKRVLEPLGLVEEGAKTAPGKKRPIESPDSSTGIGKNGQPPAKKKLNFGQTGDSESVPDPQPLGEPPAAPSGLGSGTMAAGGGAPMADNNEGADGVGNASGNWHCDSTWLGDRVITTSTRTWALPTYNNHLYKQISSQSGATNDNHFFGYSTPWGYFDFNRFHCHFSPRDWQRLINNNWGFRPRKLRFKLFNIQVKEVTTNDGVTTIANNLTSTIQVFSDSEYQLPYVLGSAHQGCLPPFPADVFMIPQYGYLTLNNGSQSVGRSSFYCLEYFPSQMLRTGDNFEFSYTFEEVPFHSSYAHSQSLDRLMNPLIDQYLYYLARTQSTTGSTRELQFHQAGPNTMAEQSKNWLPGPCYRQQRLSKNIDSNNNSNFAWTGATKYHLNGRNSLTNPGVAMATNKDDEDQFFPINGVLVFGKTGAANKTTLENVLMTSEEEIKTTNPVATEEYGVVSSNLQSSTAGPQTQTVNSQGALPGMVWQNRDVYLQGPIWAKIPHTDGNFHPSPLMGGFGLKHPPPQILIKNTPVPANPPEVFTPAKFASFITQYSTGQVSVEIEWELQKENSKRWNPEIQYTSNYAKSNNVEFAVNNEGVYTEPRPIGTRYLTRNL

SEQ ID NO: 153 - protein, 728 aa, Adeno-associated virus; identical to SEQ ID NO: 145

SEQ ID NO: 154 - protein, 728 aa, Adeno-associated virus
MAADGYLPDWLEDNLSEGIREWWDLKPGAPKPKANQQKQDDGRGLVLPGYKYLGPFNGLDKGEPVNEADAAALEHDKAYDKQLEQGDNPYLKYNHADAEFQERLQEDTSFGGNLGRAVFQAKKRVLEPLGLVEEGAKTAPGKKRPIESPDSSTGIGKNGQPPAKKKLNFGQTGDSESVPDPQPLGEPPAAPSGLGSGTMAAGGGAPMADNNEGADGVGNASGNWHCDSTWLGDRVITTSTRTWALPTYNNHLYKQISSQSGATNDNHFFGYSTPWGYFDFNRFHCHFSPRDWQRLINNNWGFRPRKLRFKLFNIQVKEVTTNDGVTTIANNLTSTIQVFSDSEYQLPYVLGSAHQGCLPPFPADVFMIPQYGYLTLNNGSQSVGRSSFYCLEYFPSQMLRTGNNFEFSYTFEEVPFHSSYAHSQSLDRLMNPLIDQYLYYLARTQSTTGSTRELQFHQAGPNTMAEQSKNWLPGPCYRQQRLSKNIDSNNNSNFAWTGATKYHLNGRNSLTNPGVAMATNKDDEDQFFPINGVLVFGKTGAANKTTLENVLMTSEEEIKTTNPVATEEYGVVSSNLQSSTAGPQTQTVNSQGALPGMVWQNRDVYLQGPIWAKIPHTDGNFHPSPLMGGFGLKHPPPQILIKNTPVPANPPEVFTPAKFASFITQYSTGQVSVEIEWELQKENSKRWNPEIQYTSNYAKSNNVEFAVNNEGVYTEPRPIGTRYLTRNL

SEQ ID NO: 155 - protein, 728 aa, Adeno-associated virus
MAADGYLPDWLEDNLSEGIREWWDLKPGAPKPKANQQKQDDGRGLVLPGYKYLGPFNGLDKGEPVNEADAAALEHDKAYDKQLEQGDNPYLKYNHADAEFQERLQEDTSFGGNLGRAVFQAKKRVLEPLGLVEEGAKTAPGKKRPIESPDSSTGIGKKGQQPAKKKLNFGQTGDSESVPDPQPLGEPPAAPSGLGSGTMAAGGGAPMADNNEGADGVGNASGNWHCDSTWLGDRVITTSTRTWALPTYNNHLYKQISSQSGATNDNHFFGYSTPWGYFDFNRFHCHFSPRDWQRLINNNWGFRPRKLRFKLFNIQVKEVTTNDGVTTIANNLTSTIQVFSDSEYQLPYVLGSAHQGCLPPFPADVFMIPQYGYLTLNNGSQSVGRSSFYCLEYFPSQMLRTGNNFEFSYTFEEVPFHSSYAHSQSLDRLMNPLIDQYLYYLARTQSTTGSTRELQFHQAGPNTMAEQSKNWLPGPCYRQQRLSKNIDSNNNSNFAWTGATKYHLNGRNSLTNPGVAMATNKDDEDQFFPINGVLVFGKTGAANKTTLENVLMTSEEEIKTTNPVATEEYGVVSSNLQSSTAGPQTQTVNSQGALPGMVWQNRDVYLQGPIWAKIPHTDGNFHPSPLMGGFGLKHPPPQILIKNTPVPANPPEVFTPAKFASFITQYSTGQVSVEIEWELQKENSKRWNPEIQYTSNYAKSNNVEFAVNNEGVYTEPRPIGTRYLTRNL

SEQ ID NO: 156 - DNA, 2215 bp, Artificial Sequence
  Description of Artificial Sequence: Synthetic polynucleotide
atggctgccgatggttatcttccagattggctcgaggacactctctctgaaggaataagacagtggtggaagctcaaacctggcccaccaccaccaaagcccgcagagcggcataaggacgacagcaggggtcttgtgcttcctgggtacaagtacctcggacccttcaacggactcgacaagggagagccggtcaacgaggcagacgccgcggccctcgagcacgacaaagcctacgaccggcagctcgacagcggagacaacccgtacctcaagtacaaccacgccgacgccgagttccaggagcggctcaaagaagatacgtcttttgggggcaacctcgggcgagcagtcttccaggccaaaaagaggcttcttgaacctcttggtctggttgaggaagcggctaagacggctcctggaaagaagaggcctgtagagcactctcctgtggagccagactcctcctcgggaaccggaaaggcgggccagcagcctgcaagaaaaagattgaattttggtcagactggagacgcagactcagtcccagaccctcaaccaatcggagaacctcccgcagccccctcaggtgtgggatctcttacaatggctgcaggcggtggcgcaccaatggcagacaataacgagggcgccgacggagtgggtaattcctcgggaaattggcattgcgattccacatggatgggcgacagagtcatcaccaccagcacccgaacctgggccctgcccacctacaacaaccacctctacaagcaaatctccaacagcacatctggaggatcttcaaatgacaacgcctacttcggctacagcaccccctgggggtattttgactttaacagattccactgccacttttcaccacgtgactggcagcgactcatcaacaacaactggggattccggcccaagagactcagcttcaagctcttcaacatccaggtcaaggaggtcacgcagaatgaaggcaccaagaccatcgccaataacctcaccagcaccatccaggtgtttacggactcggagtaccagctgccgtacgttctcggctctgcccaccagggctgcctgcctccgttcccggcggacgtgttcatgattccccagtacggctacctaacactcaacaacggtagtcaggccgtgggacgctcctccttctactgcctggaatactttccttcgcagatgctgagaaccggcaacaacttccagtttacttacaccttcgaggacgtgcctttccacagcagctacgcccacagccagagcttggaccggctgatgaatcctctgattgaccagtacctgtactacttgtctcggactcaaacaacaggaggcacgacaaatacgcagactctgggcttcagccaaggtgggcctaatacaatggccaatcaggcaaagaactggctgccaggaccctgttaccgccagcagcgagtatcaaagacatctgcggataacaacaacagtgaatactcgtggactggagctaccaagtaccacctcaatggcagagactctctggtgaatccgggcccggccatggcaagccacaaggacgatgaagaaaagtttttttcctcagagcggggttctcatctttgggaagcaaggctcagagaaaacaaatgtggacattgaaaaggtcatgattacagacgaagaggaaatcaggacaaccaatcccgtggctacggagcagtatggttctgtatctaccaacctccagagaggcaacagacaagcagctaccgcagatgtcaacacacaaggcgttcttccaggcatggtctggcaggacagagatgtgtaccttcaggggcccatctgggcaaagattccacacacggacggacattttcacccctctcccctcatgggtggattcggacttaaacaccctccgcctcagatcctgatcaagaacacgcctgtacctgcggatcctccgaccaccttcaaccagtcaaagctgaactctttcatcacccagtattctactggccaagtcagcgtggagatcgagtgggagctgcagaaggaaaacagcaagcgctggaaccccgagatccagtacacctccaactactacaaatctacaagtgtggactttgctgttaatacagaaggcgtgtactctgaaccccgccccattggcacccgttacctcacccgtaatctgtaa

SEQ ID NO: 157 - protein, 737 aa, Artificial Sequence
  Description of Artificial Sequence: Synthetic polypeptide
MAADGYLPDWLEDTLSEGIRQWWKLKPGPPPPKPAERHKDDSRGLVLPGYKYLGPFNGLDKGEPVNEADAAALEHDKAYDRQLDSGDNPYLKYNHADAEFQERLKEDTSFGGNLGRAVFQAKKRLLEPLGLVEEAAKTAPGKKRPVEHSPVEPDSSSGTGKAGQQPARKRLNFGQTGDADSVPDPQPIGEPPAAPSGVGSLTMAAGGGAPMADNNEGADGVGNSSGNWHCDSTWMGDRVITTSTRTWALPTYNNHLYKQISNSTSGGSSNDNAYFGYSTPWGYFDFNRFHCHFSPRDWQRLINNNWGFRPKRLSFKLFNIQVKEVTQNEGTKTIANNLTSTIQVFTDSEYQLPYVLGSAHQGCLPPFPADVFMIPQYGYLTLNNGSQAVGRSSFYCLEYFPSQMLKTGNNFQFTYTFEDVPFHSSYAHSQSLDRLMNPLIDQYLYYLSRTQTTGGTTNTQTLGFSQGGPNTMANQAKNWLPGPCYRQQRVSKTSADNNNSEYSWTGATKYHLNGRDSLVNPGPAMASHKDDEEKFFPQSGVLIFGKQGSEKTNVDIEKVMITDEEEIRTTNPVATEQYGSVSTNLQRGNRQAATADVNTQGVLPGMVWQDRDVYLQGPIWAKIPHTDGHFHPSPLMGGFGLKHPPPQILIKNTPVPADPPTTFNQSKLNSFITQYSTGQVSVEIEWELQKENSKRWNPEIQYTSNYYKSTSVDFAVNTEGVYSEPRPIGTRYLTRNL

SEQ ID NO: 158 - protein, 737 aa, Artificial Sequence
  Description of Artificial Sequence: Synthetic polypeptide
MAADGYLPDWLEDTLSEGIRQWWKLKPGPPPPKPAERHKDDSRGLVLPGYKYLGPFNGLDKGEPVNEADAAALEHDKAYDRQLDSGDNPYLKYNHADAEFQERLKEDTSFGGNLGRAVFQAKKRLLEPLGLVEEAAKTAPGKKRPVEHSPVEPDSSSGTGKAGQQPARKRLNFGQTGDADSVPDPQPIGEPPAAPSGVGSLTMAAGGGAPMADNNEGADGVGNSSGNWHCDSTWMGDRVITTSTRTWALPTYNNHLYKQISNSTSGGSSNDNAYFGYSTPWGYFDFNRFHCHFSPRDWQRLINNNWGFRPKRLSFKLFNIQVKEVTQNEGTKTIANNLTSTIQVFTDSEYQLPYVLGSAHQGCLPPFPADVFMIPQYGYLTLNNGSQAVGRSSFYCLEYFPSQMLKTGNNFQFTYTFEDVPFHSSYAHSQSLDRLMNPLIDQYLYYLSRTQTTGGTTNTQTLGFSQGGPNTMANQAKNWLPGPCYRQQRVSKTSADNNNSEYSWTGATKYHLNGRDSLVNPGPAMASHKDDEEKFFPQSGVLIFGKQGSEKTNVDIEKVMITDEEEIRTTNPVATEQYGSVSTNLQQGNTQAATADVNTQGVLPGMVWQDRDVYLQGPIWAKIPHTDGHFHPSPLMGGFGLKHPPPQILIKNTPVPADPPTTFNQSKLNSFITQYSTGQVSVEIEWELQKENSKRWNPEIQYTSNYYKSTSVDFAVNTEGVYSEPRPIGTRYLTRNL

SEQ ID NO: 159 - protein, 737 aa, Artificial Sequence
  Description of Artificial Sequence: Synthetic polypeptide
MAADGYLPDWLEDTLSEGIRQWWKLKPGPPPPKPAERHKDDSRGLVLPGYKYLGPFNGLDKGEPVNEADAAALEHDKAYDRQLDSGDNPYLKYNHADAEFQERLKEDTSFGGNLGRAVFQAKKRLLEPLGLVEEAAKTAPGKKRPVEHSPVEPDSSSGTGKAGQQPARKRLNFGQTGDADSVPDPQPIGEPPAAPSGVGSLTMAAGGGAPMADNNEGADGVGNSSGNWHCDSTWMGDRVITTSTRTWALPTYNNHLYKQISNSTSGGSSNDNAYFGYSTPWGYFDFNRFHCHFSPRDWQRLINNNWGFRPKRLSFKLFNIQVKEVTQNEGTKTIANNLTSTIQVFTDSEYQLPYVLGSAHQGCLPPFPADVFMIPQYGYLTLNNGSQAVGRSSFYCLEYFPSQMLRTGNNFQFTYTFEDVPFHSSYAHSQSLDRLMNPLIDQYLYYLSRTQTTGGTTNTQTLGFSQGGPNTMANQAKNWLPGPCYRQQRVSKTSADNNNSEYSWTGATKYHLNGRDSLVNPGPAMASHKDDEEKFFPQSGVLIFGKQGSEKTNVDIEKVMITDEEEIRTTNPVATEQYGSVSTNLQQGNTQAATADVNTQGVLPGMVWQDRDVYLQGPIWAKIPHTDGHFHPSPLMGGFGLKHPPPQILIKNTPVPADPPTTFNQSKLNSFITQYSTGQVSVEIEWELQKENSKRWNPEIQYTSNYYKSTSVDFAVNTEGVYSEPRPIGTRYLTRNL

SEQ ID NO: 160 - protein, 729 aa, Artificial Sequence
  Description of Artificial Sequence: Synthetic polypeptide
MAADGYLPDWLEDNLSEGIREWWDLKPGAPKPKANQQKQDDGRGLVLPGYKYLGPFNGLDKGEPVNAADAAALEHDKAYDQQLKAGDNPYLRYNHADAEFQERLQEDTSFGGNLGRAVFQAKKRVLEPLGLVEEGAKTAPGKKRPIDSPDSSTGIGKKGQQPAKKKLNFGQTGDSESVPDPQPLGEPPAAPSSVGSGTMAAGGGAPTADNNEGADGVGNASGNWHCDSTWLGDRVITTSTRTWALPTYNNHLYKQISSSSSGATNDNHYFGYSTPWGYFDFNRFHCHFSPRDWQRLINNNWGFRPKKLRFKLFNIQVKEVTTNDGVTTIANNLTSTVQVFSDSEYQLPYVLGSAHQGCLPPFPADVFMIPQYGYLTLNNGSQSVGRSSFYCLEYFPSQMLRTGNNFEFSYSFEDVPFHSSYAHSQSLDRLMNPLIDQYLYYLARTQSTTGSTRELQFHQAGPNTMAEQSKNWLPGPCYRQQRLSKNLDFNNNSNFAWTAATKYHLNGRNSLTNPGIPMATNKDDEDQFFPINGVLVFGKTGAANKTTLENVLMTSEEEIKTTNPVATEEYGVVSSNLQSSTAGPQSQTINSQGALPGMVWQNRDVYLQGPIWAKIPHTDGNFHPSPLMGGFGLEHPPPQILIKNTPVPANPPEVFTPAKFASFITQYSTGQVSVEIEWELQKENSKRWNPEIQYTSNYAKSNNVEFAVNPDGVYTEPRPIGTRYLTRNL

SEQ ID NO: 161 - DNA, 3075 bp, Adeno-associated virus
tgagaactttcctttcaacgattgcgtcggacaagatggtgatctggtgggaggaggggaagatgaccgccaaggtcgtggagtcggccaaagccattcttggaggaagcaaggtgcgtgtggaccagaaatgcaagtcctcggcccagatagacccgactcccgtgatcgtcacctccaacaccaacatgtgcgccgtgattgacgggaactcaacgaccttcgagcaccagcagccgttgcaagaccggatgttcaaatttgaacttacccgccgtctggatcatgactttggaaaggtcaccaagcaggaagtgaaagactttttccggtgggcaaaggatcacgtggttgaggtggagcatgaattctacgtcaaaaagggtggagctaagaaaagacccgcccccagtgacgcagatataagtgagcccaaacgggcgcgcgagtcagttgcgcagccatcaacgtcagacgcggaagcttcgatcaactacgcggacaggtaccaaaaacaaatgttctcgtcacgtgggcatgaatctgatgctgtttccctgcagacaatgcgagagaatgaatcagaattcaaatatctgcttcactcacggacagaaagactgtttagagtgctttcccgtgtcagaatctcaacccgtttctgtcgtcaaaaaggcgtatcagaaactgtgctacattcatcatatcatgggaaaggtgccagacgcttgcactgcctgcgatctggtcaatgtggatttggatgactgcatctctgaacaataaatgatttaaatcaggtatggctgccgatggttatcctccagattggctcgaggacactctctctgaagggataagacagtggtggaagctcaaacctggcccaccaccaccaaagcccgcagagcggcataaggacgacagcaggggtcttgtgcttcctgggtacaagtacctcggacccttcaacggactcgacaagggggagccggtcaacgaggcagacgccgcggccctcgagcacgacaaggcctacgaccggcagctcgacagcggagacaacccgtacctcaagtacaaccacgccgacgcagagtttcaggagcgccttaaagaagatacgtcttttgggggcaacctcggacgagcagtcttccaggcgaaaaagagggttcttgaacctctgggcctggttgaggaacctgttaagacggctccgggaaaaaagaggccggtagagcactctcctgtggagccagactcctcctcgggaaccggaaaagcgggccagcggcctgcaagaaaaagattaaattttggtcagactggagacgcagactccgtacctgacccccagcctctcggacagccaccagcagccccctctggtctgggatctactacaatggctacaggcagtggcgcaccaatggcagacaataacgagggtgccgatggagtgggtaattcctcaggaaattggcattgcgattcccaatggctgggcgacagagtcatcaccaccagcacccgaacctgggccctgcccacatacaacaaccacctctacaagcaaatctccagccaatcaggagccagcaacgacaaccactactttggctacagcaccccctgggggtattttgacttcaacagattccactgccacttttcaccacgtgactggcaaagactcatcaacaacaactggggattccggcccaaaagactcaacttcaagctctttaatattcaagtcaaagaggtcacgcagaatgacggtacgacgacgattgccaataaccttaccagcacggttcaggtgtttactgactcggagtaccagctcccgtacgtcctgggctcggcgcatcaaggatgcctcccgccgtttccagcggacgtcttcatggtcccacagtatggatacctcaccctgaacaacgggagtcaggcggtaggacgctcttccttttactgcctggagtactttccttctcagatgctgcgtactggaaacaactttcagttcagctacacttttgaagacgtgcctttccacagcagctacgctcacagccagagtctggatcggctgatgaatcctctgatcgaccagtacctgtattatctgaacaagacacaaacaaatagtggaactcttcagcagtctcggctactgtttagccaagctggaccaaccaacatgtctcttcaagctaaaaactggctgcctggaccttgctacagacagcagcgtctgtcaaaacaggcaaacgacaacaacaacagcaactttccctggactgcagctacaaagtatcatctaaatggccgggactcgttggttaatccaggaccagctatggccagtcacaaggatgacgaagaaaagtttttccccatgcatggaaccctgatatttggtaaacaaggaacaaatgccaacgacgcggatttggaaaatgtcatgattacagatgaagaagaaatcagggccaccaatcccgtggctacggagcagtacgggactgtgtcaaataatttgcaaaactcaaacactggtccaactactggaactgtcaatcgccaaggagcgttacctggtatggtgtggcaggatcgagacgtgtacctgcagggacccatttgggccaagattcctcacaccgatggacactttcatccttctccactgatgggaggttttggactcaaacacccgcctcctcagatcatgatcaaaaacactcccgttccagccaatcctcccacaaacttcagttctgccaagtttgcttctttcatcacacagtattccacgggacaggtcagcgtggagatcgagtgggagctgcagaaggagaacagcaaacgctggaatcccgaaattcagtacacttccaactacaacaagtctgttaatgtggactttactgtggacactaatggtgtgtattcagagcctcgccccattggcaccagatacctgactcgtaatctgtaattgcttgttaatcaataaaccgtttaattcgtttcagttgaactttggtctctgcgaagggcgaa

SEQ ID NO: 162 - DNA, 3142 bp, Adeno-associated virus
aaaacgacgggccagtgattgtaatacgactcactatagggcgaaattgaaattagcggccgcgaattcgcctttcgcagagaccaaagttcaactgaaacgaattaaacggtttattgattaacaagcaattacagattacgagtcaggtatctggtgccaatggggcgaggctctgaatacacaccattagtgtccacagtaaagtccacattaacagacttgttgtagttggaagtgtactgaatttcgggattccagcgtttgctgttctccttctgcagctcccactcgatctccacgctgacctgtcccgtggaatactgtgtgatgaaagaagcaaacttggcagaactgaagtttgtgggaggattggctggaacgggagtgtttttgatcatgatctgaggaggcgggtgtttgagtccaaaacctcccatcagtggagaaggatgaaagtgtccatcggtgtgaggaatcttggcccaaatgggtccctgcaggtacacgtctcgatcctgccacaccataccaggtaacgctccttggtgattgacagttccagtagttggaccagtgtttgagttttgcaaattatttgacacagtcccgtactgctccgtagccacgggattggtggccctgatttcttcttcatctgtaatcatgacattttccaaatccgcgtcgttggcatttgttccttgtttaccaaatatcagggttccatgcatggggaaaaacttttcttcgtcatccttgtgactggccatagctggtcctggattaaccaacgagtcccggccatttagatgatactttgtagctgcagtccagggaaagttgctgttgttgttgtcgtttgcctgttttgacagacgctgctgtctgtagcaaggtccaggcagccagtttttagcttgaagagacatgttggttggtccagcttggctaaacagtagccgagactgctgaagagttccactatttgtttgtgtcttgttcagataatacaggtactggtcgatcagaggattcatcagccgatccagactctggctgtgagcgtagctgctgtggaaaggcacgtcttcaaaagtgtagctgaactgaaagttgtttccagtacgcagcatctgagaaggaaagtactccaggcagtaaaaggaagagcgtcctaccgcctgactcccgttgttcagggtgaggtatccatactgtgggaccatgaagacgtccgctggaaacggcgggaggcatccttgatgcgccgagcccaggacgtacgggagctggtactccgagtcagtaaacacctgaaccgtgctggtaaggttattggcaatcgtcgtcgtaccgtcattctgcgtgacctctttgacttgaatattaaagagcttgaagttgagtcttttgggccggaatccccggttgttgttgacgagtctttgccagtcacgtggtgaaaagtggcagtggaatctgttgaagtcaaaatacccccagggggtgctgtagccaaagtagtggttgtcgttgctggctcctgattggctggagatttgcttgtagaggtggttgttgtatgtgggcagggcccaggttcgggtgctggtggtgatgactctgtcgcccagccattgggaatcgcaatgccaatttcctgaggaattacccactccatcggcaccctcgttattgtctgccattggtgcgccactgcctgtagccattgtagtagatcccagaccagagggggctgctggtggctgtccgagaggctgggggtcaggtacggagtctgcgtctccagtctgaccaaaatttaatctttttcttgcaggctgctggcccgcttttccggttcccgaggaggagtctggctccacaggagagtgctctaccggcctcttttttcccggagccgtcttaacaggctcctcaaccaggcccagaggttcaagaaccctctttttcgcctggaagactgctcgtccgaggttgcccccaaaagacgtatcttctttaaggcgctcctgaaactctgcgtcggcgtggttgtacttgaggtacgggttgtctccgctgtcgagctgccggtcgtaggccttgtcgtgctcgagggccgcggcgtctgcctcgttgaccggctcccccttgtcgagtccgttgaagggtccgaggtacttgtacccaggaagcacaagacccctgctgtcgtccttatgccgctctgcgggctttggtggtggtgggccaggtttgagcttccaccactgtcttattccttcagagagagtgtcctcgagccaatctggaagataaccatcggcagccatacctgatttaaatcatttattgttcagagatgcagtcatccaaatccacattgaccagatcgcaggcagtgcaagcgtctggcacctttcccatgatatgatgaatgtagcacagtttctgatacgcctttttgacgacagaaacgggttgagattctgacacgggaaagcactctaaacagtctttctgtccgtgagtgaagcagatatttgaattctgattcattctctcgcattgtctgcagggaaacagcatcagattcatgcccacgtgacgagaacatttgttttggtacctgtccgcgtagttgatcgaagcttccgcgtctgacgtcgatggctgcgcaactgactcgcgcgcccgtttgggctcacttatatctgcgtcactgggggcgggtcttttcttagctccaccctttttgacgtagaattcatgctccacctcaaccacgtgatcctttgcccaccggaaaaagtctttcacttcctgcttggtgacctttccaaagtcatgatccagacggcgggtaagttcaaatttgaacatccggtcttgcaacggctgctggtgctcgaaggtcgttgagttcccgtcaatcacggcgcacatgttggtgttggaggtgacgatcacgggagtcgggtctatctgggccgaggacttgcatttctggtccacacgcaccttgcttcctccaagaatggctttggccgactccacgaccttggcggtcatcttcccctcctcccaccagatcaccatcttgtcgacgcaatggtaaaaggaaagttctcattgg

SEQ ID NO: 163 - protein, 735 aa, Adeno-associated virus 2
MAADGYLPDWLEDTLSEGIRQWWKLKPGPPPPKPAERHKDDSRGLVLPGYKYLGPFNGLDKGEPVNEADAAALEHDKAYDRQLDSGDNPYLKYNHADAEFQERLKEDTSFGGNLGRAVFQAKKRVLEPLGLVEEPVKTAPGKKRPVEHSPVEPDSSSGTGKAGQQPARKRLNFGQTGDADSVPDPQPLGEPPATPAAVGPTTMASGGGAPMADNNEGADGVGNASGNWHCDSTWLGDRVITTSTRTWALPTYNNHLYKQISSASTGASNDNHYFGYSTPWGYFDFNRFHCHFSPRDWQRLINNNWGFRPKRLNFKLFNIQVKEVTQNDGTTTIANNLTSTVQVFTDSEYQLPYVLGSAHQGCLPPFPADVFMIPQYGYLTLNNGSQAVGRSSFYCLEYFPSQMLRTGNNFTFSYTFEDVPFHSSYAHSQSLDRLMNPLIDQYLYYLNRTQNQSGSAQDKALLFSRGSPAGMSVQPKNWLPGPCYRQQRVSKTKTDNNNSNFTWTGASKYNLNGRESIINPGTAMASHKDDKDKFFPMSGVMIFGKESAGASNTALDNVMITDEEEIKATNPVATERFGTVAVNFQSSSTDPATGDVHVMGALPGMVWQDRDVYLQGPIWAKIPHTDGHFHPSPLMGGFGLKHPPPQILIKNTPVPANPPAEFSATKFASFITQYSTGQVSVEIEWELQKENSKRWNPEVQYTSNYAKSANVDFTVDNNGLYTEPRPIGTRYLTRP

SEQ ID NO: 164 - protein, 740 aa, Adeno-associated virus 2
MAADGYLPDWLEDTLSEGIRQWWKLKPGPPPPKPAERHKDDSRGLVLPGYKYLGPFNGLDKGEPVNAADAAALEHDKAYDRQLDSGDNPYLKYNHADAEFQERLKEDTSFGGNLGRAVFQAKKRVLEPLGLVEEPVKTAPGKKRPVEHSPVEPDSSSGTGKAGQQPARKRLNFGQTGDADSVPDPQPLGQPPAAPSGLGTNTMATGSGAPMADNNEGADGVGNSSGNWHCDSTWMGDRVITTSTRTWALPTYNNHLYKQISSQSGASNDNHYFGYSTPWGYFDFNRFHCHFSPRDWQRLINNNWGFRPKRLNFKLFNIQVKEVTQNDGTTTIANNLTSTVQVFTDSEYQLPYVLGSAHQGCLPPFPADVFMVPQYGYLTLNNGSQAVGRSSFYCLEYFPSQMLRTGNNFTFSYTFEDVPFHSSYAHSQSLDRLMNPLIDQYLYYLSRTNTPSGTTTQSGLQFSQAGASDIRDQSRNWLPGPCYRQQRVSKTSADNNNSEYSWTGATKYHLNGRDSLVNPGPAMASHKDDEEKFFPQSGVLIFGKQGSEKTNVDIEKVMITDEEEIRTTNPVATEQYGSVSTNLQRGNRQAATADVNTQGVLPGMVWQDRDVYLQGPIWAKIPHTDGHFHPSPLMGGFGLKHPPPQILIKNTPVPANPSTTFSAAKFASFITQYSTGQVSVEIEWELQKENSKRWNPEIQYTSNYNKSVNVDFTVDTNGVYSEPRPIGTRYLTRNLLLAAA

SEQ ID NO: 165 - protein, 734 aa, Adeno-associated virus 2
MAADGYLPDWLEDTLSEGIRQWWKLKPGPPPPKPAERHKDDSRGLVLPGYKYLGPFNGLDKGEPVNEADAAALEHDKAYDRQLDSGDNPYLKYNHADAEFQERLKEDTSFGGNLGRAVFQAKKRVLEPLGLVEEPVKTAPGKKRPVEHSPVEPDSSSGTGKAGQQPARKRLNFGQTGDADSVPDPQPLGQPPAAPSGLGTNTMATGSGAPMADNNEGADGVGNSSGNWHCDSTWMGDRVITTSTRTWALPTYNNHLYKQISSQSGASNDNHYFGYSTPWGYFDFNRFHCHFSPRDWQRLINNNWGFRPKRLNFKLFNIQVKEVTQNDGTTTIANNLTSTVQVFTDSEYQLPYVLGSAHQGCLPPFPADVFMVPQYGYLTLNNGSQAVGRSSFYCLEYFPSQMLRTGNNFTFSYTFEDVPFHSSYAHSQSLDRLMNPLIDQYLYYLSRTNTPSGTTTQSGLQFSQAGASDIRDQSRNWLPGPCYRQQRVSKTSADNNNSEYSWTGATMYHLNGRDSLVNPGPAMASHKDDEEKFFPQSGVLIFGKQGSEKTNVDIEKVMITDEEEIRTTNPVATEQYGSVSTNLQRGNRQAATADVNTQGVLPGMVWQDRDVYLQGPIWAKIPHTDGHFHPSPLMGGFGLKHPPPQILIKNTPVPANPSTTFSAAKFASFITQYSTGQVSVEIEWELQKENSKRWNPEIQYTSNYNKSINVDFTVDTNGVYSEPRPIGTRYLTRN

SEQ ID NO: 166 - protein, 734 aa, Adeno-associated virus 2
MAADGYLPDWLEDTLSEGIRQWWKLKPGPPPPKPAERHKDDSRGLVLPGYKYLGPFNGLDKGEPVNEADAAALEHDKAYDRQLDSGDNPYLKYNHADAEFQERLKEDTSFGGNLGRAVFQAKKRVLEPLGLVEEPVKTAPGKKRPVEHSPVEPDSSSGTGKAGQQPARKRLNFGQTGDADSVPDPQPLGQPPAAPSGLGTNTMATGSGAPMADNNEGADGVGNSSGNWHCDSTWMGDRVITTSTRTWALPTYNNHLYKQISSQSGASNDNHYFGYSTPWGYFDFNRFHCHFSPRDWQRLINNNWGFRPKRLNFKLFNIQVKEVTQNDGTTTIANNLTSTVQVFTDSEYQLPYVLGSAHQGCLPPFPADVFMVPQYGYLTLNNGSQAVGRSSFYCLEYFPSQMLRTGNNFTFSYTFEDVPFHSSYAHSQSLDRLMNPLIDQYLYYLSRTNTPSGTTTQSGLQFSQAGASDIRDQSRNWLPGPCYRQQRVSKTSADNNNSEYSWTGATKYHLNGRDSLVNPGPAMASHKDDEEKFFPQSGVLIFGKQGSEKTNVDIEKVMITDEEEIRTTNPVATEQYGSVSTNLQRGNRQAATADVNTQGVLPGMVWQDRDVYLQGPIWAKIPHTDGHFHPSPLMGGFGLKHPPPQILIKNTPVPANPSTTFSEAKFASFITQYSTGQVSVEIEWELQKENSKRWNPEIQYTSNYNKSVNVDFTVDTNGVYSEPRPIGTRYLTRN

SEQ ID NO: 167 - protein, 739 aa, Adeno-associated virus 2
MAADGYLPDWLEDTLSEGIRQWWKLKPGPPPPKPAERHKDDSRGLVLPGYKYLGPFNGLDKGEPVNEADAAALEHDKAYDRQLDSGDNPYLKYNHADAEFQERLKEDTSFGGNLGRAVFQAKKRVLEPLGLVEEPVKTAPGKKRPVEHSPVEPDSSSGTGKAGQQPARKRLNFGQTGDADSVPDPQPLGQPPAAPSGLGTNTMATGSGAPMADNNEGADGVGNSSGNWHCDSTWMGDRVITTSTRTWALPTYNNHLYKQISSQSGASNDNHYFGYSTPWGYFDFNRFHCHFSPRDWQRLINNNWGFRPKRLNFKLFNIQVKEVTQNDGTTTIANNLTSTVQVFTDSEYQLPYVLGSAHQGCLPPFPADVFMVPQYGYLTLNNGSQAVGRSSFYCLEYFPSQMLRTGNNFTFSYTFEDVPFHSSYAHSQSLDRLMNPLIDQYLYYLSRTNTPSGTTTQSGLQFSQAGASDIRDQSRNWLPGPCYRQQRVSKTSADNNNSEYSWTGATKYHLNGRDSLVNPGPAMASHKDDEEKFFPQSGVLIFGKQGSEKTNVDIEKVMITDEEEIRTTNPVATEQYGSVSTNLQRGNRQAATADVNTQGVLPGMVWQDRDVYLQGPIWAKIPHTDGHFHPSPLMGGFGLKHPPPQILIKNTPVPANPSTTFSAAKFASFITQYSTGQVSVEIEWELQKENSKRWNPEIQYTSNYNKSVNVDFTVDTNGVYSEPRPIGTRYLTRNLLLAA

SEQ ID NO: 168 - protein, 725 aa, Adeno-associated virus 2
MAADGYLPDWLEDTLSEGIRQWWKLKPGPPPPKPAERHKDDSRGLVLPGYKYLGPFNGLDKGEPVNEADAAALEHDKAYDRQLDSGDNPYLKYNHADAEFQERLKEDTSFGGNLGRAVFQAKKRVLEPLGLVEEPVKTAPGKKRPVEHSPVEPDSSSGTGKAGQQPARKRLNFGQTGDADSVPDPQPLGQPPAAPSGLGTNTMATGSGAPMADNNEGADGVGNSSGNWHCDSTWMGDRVITTSTRTWALPTYNNHLYKQISSQSGASNDNHYFGYSTPWGYFDFNRFHCHFSPRDWQRLINNNWGFRPKRLNFKLFNIQVKEVTQNDGTTTIANNLTSTVQVFTDSEYQLPYVLGSAHQGCLPPFPADVFMVPQYGYLTLNNGSQAVGRSSFYCLEYFPSQMLRTGNNFTFSYTFEDVPFHSSYAHSQSLDRLMNPLIDQYLYYLSRTNTPSGTTTQSGLQFSQAGASDIRDQSRNWLPGPCYRQQRVSKTSADNNNSEYSWTGATKYHLNGRDSLVNPGPAMASHKDDEEKFFPQSGVLIFGKQGSEKTNVDIEKVMITDEEEIRTTNPVATEQYGSVSTNLQRGNRQAATADVNTQGVLPGMVWQDRDVYLQGPIWAKIPHTDGHFHPSPLMGGFGLKHPPPQILIKNTPVPANPSTTFSAAKFASFITQYSTGQVSVEIEWELQKENSKRWNPEIQYTSNYNKSVNVDFTVDTNGVYSEPRP

SEQ ID NO: 169 - protein, 707 aa, Adeno-associated virus 2
MAADGYLPDWLEDTLSEGIRQWWKLKPGPPPPKPAERHKDDSRGLVLPGYKYLGPFNGLDKGEPVNEADAAALEHDKAYDRQLDSGDNPYLKYNHADAEFQERLKEDTSFGGNLGRAVFQAKKRVLEPLGLVEEPVKTAPGKKRPVEHSPVEPDSSSGTGKAGQQPARKRLNFGQTGDADSVPDPQPLGQPPAAPSGLGTNTMATGSGAPMADNNEGADGVGNSSGNWHCDSTWMGDRVITTSTRTWALPTYNNHLYKQISSQSGASNDNHYFGYSTPWGYFDFNRFHCHFSPRDWQRLINNNWGFRPKRLNFKLFNIQVKEVTQNDGTTTIANNLTSTVQVFTDSEYQLPYVLGSAHQGCLPPFPADVFMVPQYGYLTLNNGSQAVGRSSFYCLEYFPSQMLRTGNNFTFSYTFEDVPFHSSYAHSQSLDRLMNPLIDQYLYYLSRTNTPSGTTTQSGLQFSQAGASDIRDQSRNWLPGPCYRQQRVSKTSADNNNSEYSWTGATKYHLNGRDSLVNPGPAMASHKDDEEKFFPQSGVLIFGKQGSEKTNVDIEKVMITDEEEIRTTNPVATEQYGSCIYQPPERQQTSSYRRCQHTRRSSRHGLAGQRCVPSGAHLGKDSTHGRTFSPLSPHGWIRTTPSSTDSHQEHPGTCESFDHLQCGKVCFLHHTVLHGTGQRGDRVRAAEGKQQTLESRNSVHFQLQQVC

SEQ ID NO: 170 - protein, 739 aa, Adeno-associated virus 2; identical to SEQ ID NO: 167

SEQ ID NO: 171 - protein, 737 aa, Adeno-associated virus 2
MASDGYLPDWLEDNLSEGIREWWDLKPGAPKPKANQQKQDDGRGLVLPGYKYLGPFNGLDKGEPVNAADAAALEHDKAYDQQLKAGDNPYLRYNHADAEFQERLQEDTSFGGNLGRAVFQAKKRVLEPFGLVEEGAKTAPGKKRPVEQSPQEPDSSSGIGKTGQQPAKKRLNFGQTGDSESVPDPQPLGEPPATPAAVGPTTMASGGGAPMADNNEGADGVGNASGNWHCDSTWLGDRVITTSTRTWALPTYNNHLYKQISSASTGASNDNHYFGYSTPWGYFDFNRFHCHFSPRDWQRLINNNWGFRPKRLNFKLFNIQVKEVTTNDGTTTIANNLTSTVQVFTDSEYQLPYVLGSAHQGCLPPFPADVFMVPQYGYLTLNNGSQAVGRSSFYCLEYFPSQMLRTGNNFTFSYTFEDVPFHSSYAHSQSLDRLMNPLIDQYLYYLSRTNTPSGTTTQSGLQFSQAGASDIRDQSRNWLPGPCYRQQRVSKTSADNNNSEYSWTGATKYHLNGRDSLVNPGPAMASHKDDEEKFFPQSGVLIFGKQGSEKTNVDIEKVMITDEEEIRTTNPVATEQYGSVSTNLQRGNRQAATADVNTQGVLPGMVWQDRDVYLQGPIWAKIPHTDGHFHPSPLMGGFGLKHHPPQILIKNTPVPANPSTTFSAAKFASFITQYSTGQVSVEIEWELQKENSKRWNPEIQYTSNYNKSVNVDFTVDTNGVYSEPRPIGTRYLTRNLL

SEQ ID NO: 172 - protein, 741 aa, Adeno-associated virus 2
MAADGYLPDWLEDTLSEGIREWWALKPGAPKPKANQQKQDDGRGLVLPGYKYLGPFNGLDKGEPVNEADAAALEHDKAYDQQLQAGDNPYLRYNHADAEFQERLQEDTSFGGNLGRAVFQAKKRVLEPLGLVEEPVKTAPGKKRPVEHSPVEPDSSSGTGKSGQQPARKRLNFGQTGDADSVPDPQPLGQPPAAPSGLGTNTMATGSGAPMADNNEGADGVGNSSGNWHCDSTWMGDRVITTSTRTWALPTYNNHLYKQISSQSGASNDNHYFGYSTPWGYFDFNRFHCHFSPRDWQRLINNNWGFRPKRLNFKLFNIQVKEVTQNDGTTTIANNLTSTVQVFTDSEYQLPYVLGSAHQGCLPPFPADVFMVPQYGYLTLNNGSQAVGRSSFYCLEYFPSQMLRTGNNFTFSYTFEDVPFHSSYAHSQSLDRLMNPLIDQYLYYLSRTNTPSGTTTQSGLQFSQAGASDIRDQSRNWLPGPCYRQQRVSKTSADNNNSEYSWTGATKYHLNGRDSLVNPGPAMASHKDDEEKFFPQSGVLIFGKQGSEKTNVDIEKVMITDEEEIRTTNPVATEQYGSVSTNLQRGNLANHNNTTNARQAATADVNTQGVLPGMVWQDRDVYLQGPIWAKIPHTDGHFHPSPLMGGFGLKHPPPQILIKNTPVPANPSTTFSAAKFASFITQYSTGQVSVEIEWELQKENSKRWNPEIQYTSNYNKSINVDFTVDTNGVYSEPRPIGTRYL

SEQ ID NO: 173 - protein, 730 aa, Adeno-associated virus 2
MASDGYLPDWLEDNLSEGIREWWDLKPGAPKPKANQQKQDDGRGLVLPGYKYLGPFNGLDKGEPVNAADAAALEHDKAYDQQLKAGDNPYLRYNHADAEFQERLQEDTSFGGNLGRAVFQAKKRVLEPFGLVEEGAKTAPGKKRPVEQSPQEPDSSSGIGKTGQQPAKKRLNFGQTGDSESVPDPQPLGEPPATPAAVGPTTMASGGGAPMADNNEGADGVGNASGNWHCDSTWLGDRVITTSTRTWALPTYNNHLYKQISSASTGASNDNHYFGYSTPWGYFDFNRFHCHFSPRDWQRLINNNWGFRPKRLNFKLFNIQVKEVTTNDGVTTIANNLTSTVQVFSDSEYQLPYVLGSAHQGCLPPFPADVFMIPQYGYLTLNNGSQAVGRSSFYCLEYFPSQMLRTGNNFTFSYTFEDVPFHSSYAHSQSLDRLMNPLIDQYLYYLNRTQNQSGSAQNNDLLFSRGSPAGMSVQPKNWLPGPCYRQQRVSKTKTDNNNSNFTWTGASKYNLNGRESIINPGTAMASHKDDKDKFFPMSGVMIFGKESAGASNTALDNVMITDEEEIKATNPVATERFGTVAVNLQSSSTDPATGDVHVMGALPGMVWQDRDVYLQGPIWAKIPHTDGHFHPSPLMGGFGLKNPPPQILIKNTPVPANPPAEFSATKFASFITQYSTGQVSVEIEWELQKENSKRWNPEVQYTSNYAKSANVDFTVDNNGLYTEPRPIGTR

SEQ ID NO: 174 - protein, 735 aa, Adeno-associated virus 2
  MOD_RES (239)..(239): Xaa = any amino acid
MASDGYLPDWLEDNLSEGIREWWDLKPGAPKPKANQQKQDDGRGLVLPGYKYLGPFNGLDKGEPVNAADAAALEHDKAYDQQLKAGDNPYLRYNHADAEFQERLQEDTSFGGNLGRAVFQAKKRVLEPFGLVEEGAKTAPGKKRPVEQSPQEPDSSSGIGKTGQQPAKKRLNFGQTGDSESVPDPQPLGEPPATPAAVGPTTMASGGGAPMADNNEGADGVGNASGNWHCDSTWLGDRXITTSTRTWALPTYNNHLYKQISSASTGASNDNHYFGYSTPWGYFDFNRFHCHFSPRDWQRLINNNWGFRPKRLNFKLFNIQVKEVTTNDGVTTIANNLTSTVQVFSDSEYQLPYVLGSAHQGCLPPFPADVFMIPQYGYLTLNNGSQAVGRSSFYCLEYFPSQMLRTGNNFTFSYTFEDVPFHSSYAHSQSLDRLMNPLIDQYLYYLNRTQNQSGSAQNNDLLFSRGSPAGMSVQPKNWLPGPCYRQQRVSKTKTDNNNSNFTWTGASKYNLNGRESIINPGTAMASHKDDKDKFFPMSGVMIFGKESAGASNTALDNVMITDEEEIKATNPVATERFGTVAVNLQSSSTDPATGDVHVMGALPGMVWQDRDVYLQGPIWAKIPHTDGHFHPSPLMGGFGLKNPPPQILIKNTPVPANPPAEFSATKFASFITQYSTGQVSVEIEWELQKENSKRWNPEVQYTSNYAKSANVDFTVDNNGLYTEPRPIGTRYLTRP

SEQ ID NO: 175 - protein, 733 aa, Adeno-associated virus 2
MASDGYLPDWLEDNLSEGIREWWDLKPGAPKPKANQQKQDDGRGLVLPGYKYLGPFNGLDKGEPVNAADAAALEHDKAYDQQLKAGDNPYLRYNHADAEFQERLQEDTSFGGNLGRAVFLAKKRVLEPFGLVEEGAKTAPGKKRPVEQSPQEPDSSSGIGKTGQQPAKKRLNFGQTGDSESVPDPQPLGEPPATPAAVGPTTMASGGGAPMADNNEGADGVGNASGNWHCDSTWLGDRVITTSTRTWALPTYNNHLYKQISSASTGASNDNHYFGYSTPWGYFDFNRFHCHFSPRDWQRLINNNWGFRPKRLNFKLFNIQVKEVTTNDGVTTIANNLTSTVQVFSDSEYQLPYVLGSAHQGCLPPFPADVFMIPQYGYLTLNNGSQAVGRSSFYCLEYFPSQMLRTGNNFTFSYTFEDVPFHSSYAHSQSLDRLMNPLIDQYLYYLNRTQNQSGSAQNNDLLFSRGSPAGMSVQPKNWLPGPCYRQQRVSKTKTDNNNSNFTWTGASKYNLNGRESIINPGTAMASHKDDKDKFFPMSGVMIFGKESAGASNTALDNVMITDEEEIKATNPVATERFGTVAVNLQSSSTDPATGDVHVMGALPGMVWQDRDVYLQGPIWAKIPHTDGHFHPSPLMGGFGLKNPPPQILIKNTPVPANPPAEFSATKFASFITQYSTGQVSVEIEWELQKENSKRWNPEVQYTSNYAKSANVDFTVDNNGLYTEPRPIGTRYLT

SEQ ID NO: 176 - protein, 734 aa, Adeno-associated virus 2
MAADGYLPDWLEDTLSEGIRQWWKLKPGPPPPKPAERHKDDSRGLVLPGCKYLGPFNGLDKGEPVNEADAAALEHDKAYDRQLDSGDNPYLKYNHADAEFQERLKEDTSFGGNLGRAVFQAKKRVLEPLGLVEEPVKTAPGKKRPVEHSPVEPDSSSGTGKAGQQPARKRLNFGQTGDADSVPDPQPLGQPPAAPSGLGTNTMATGSGAPMADNNEGADGVGNSSGNWHCDSTWMGDRVITTSTRTWALPTYNNHLYKQISSQSGASNDNHYFGYSTPWGYFDFNRFHCHFSPRDWQRLINNNWGFRPKRLNFKLFNIQVKEVTQNDGTTTIANNLTSTVQVFSDSEYQLPYVLGSAHQGCLPPFPADVFMIPQYGYLTLNNGSQAVGRSSFYCLEYFPSQMLRTGNNFTFNYTFEDVPFHSSYAHSQSLDRLMNPLIDQYLYYLNRTQNQSGSAQNNDLLFSRGSPAGMSVQPKNWLPGPCYRQQRVSKTKTDNNNSNFTWTGASKYNLNGRESIINPGTAMASHKDDKDKFFPMSGVMIFGKESAGASNTALDNVMITDEEEIKATNPVATERFGTVAVNLQSSSTDPATGDVHVMGALPGMVWQDRDVYLQGPIWAKIPHTDGHFHPSPLMGGFGLKNPPPQILIKNTPVPANPPAEFSATKFASFITQYSTGQVSVEIEWELQKENSKRWNPEVQYTSNYAKSANVDFTVDNNGLYTEPRPIGTRYLTRP

SEQ ID NO: 177 - protein, 734 aa, Adeno-associated virus 2
MAADGYLPDWLEDTLSEGIRQWWKLKPGPPPPKPAERHKDDSRGLVLPGYKYLGPFNGLDKGEPVNEADAAALEHDKAYDRQLDSGDNPYLKYNHADAEFQERLKEDTSFGGNLGRAVFQAKKRVLEPLGLVEEPVKTAPGKKRPVEHSPVEPDSSSGTGKAGQQPARKRLNFGQTGDADSVPDPQPLGQPPAAPSGLGTNTMATGSGAPMADNNEGADGVGNSSGNWHCDSTWMGDRVITTSTRTWALSTYNNHLYKQISSQSGASNDNHYFGYSTPWGYFDFNRFHCHFSPRDWQRLINNNWGFRPKRLNFKLFNIQVKEVTQNDGTTTIANNLTSTVQVFTDSEYQLPYVLGSAHQGCLPPFPADVFMVPQYGYLTLNNGSQAVGRSSFYCLEYFPSQMLRTGNNFTFSYTFEDVPFHSSYAHSQSLDRLMNPLIDQYLYYLSRTNTPSGTTTQSRLQFSQAGASDIRDQSRNWLPGPCYRQQRVSKTSADNNNSEYSWTGATKYHLNGRDSLVNPGPAMASHKDDEEKFFPQSGVLIFGKQGSEKTNVDIEKVMITDEEEIRTTNPVATEQYGSVSTNLQRGNRQAATADVNTQGVLPGMVWQDRDVYLQGPIWAKIPHTDGHFHPSPLMGGFGLKHPPPQILIKNTPVPANPSTTFSAAKFASFITQYSTGQVSVEIEWELQKENSKRWNPEIQYTSNYNKSINVDFTVDTNGVYSEPRPIGTRYLTRN

SEQ ID NO: 178 - protein, 738 aa, Adeno-associated virus 2
MAADGYLPDWLEDTLSEGIRQWWKLKPGPPPPKPAERHKDDSRGLVLPGYKYLGPFNGLDKGEPVNEADAAALEHDKAYDRQLDGGDNPYLKYNHADAEFQERLKEDTSFGGNLGRAVFQAKKRVLEPLGLVEEPVKTAPGKKRPVEHSPVEPDSSSGTGKAGQQPARKRLNFGQTGDADSVPDPQPLGQPPAAPSGLGTNTMATGSGAPMADNNEGADGVGNSSGNWHCDSTWMGDRVITTSTRTWALPTYNNHLYKQISSQSGASNDNHYFGYSTPWGYFDFNRFHCHFSPRDWQRLINNNWGFRPKRLNFKLFNIQVKEVTQNDGTTTIANNLTSTVQVFTDSEYQLPYVLGSAHQGCLPPFPADVFMVPQYGYLTLNNGSQAVGRSSFYCLEYFPSQMLRTGNNFTFSYTFEDVPFHSSYAHSQSLDRLMNPLIDQYLYYLSRTNTPSGTTTQSGLQFSQAGASDIRDQSRNWLPGPCYRQQRVSKTSADNNNSEYSWTGATKYHLNGRDSLVNPGPAMASHKDDEEKFFPQSGVLIFGKQGSEKTNVDIEKVMITDEEEIRTTNPVATEQYGSVSTNLQRGNRQAATADVNTQGVLPGMVWQDRDVYLQGPIWAKIPHTDGHFHPSPLMGGFGLKHPPPQILIKNTPVPANPSTTFSAAKFASFITQYSTGQVSVEIEWELQKENSKRWNPEIQYTSNYNKSVNVDFTVDTNGVYSEPRPIGTRYLTRNLLRP

SEQ ID NO: 179 - DNA, 2208 bp, Adeno-associated virus
atggctgccgatggttatcttccagattggctcgaggacactctctctgaaggaataagacagtggtggaagctcaaacctggcccaccaccaccaaagcccgcagagcggcataaggacgacagcaggggtcttgtgcttcctgggtacaagtacctcggacccttcaacggactcgacaagggggagccggtcaacgaggcagacgccgcggccctcgagcacgacaaggcctacgaccggcagctcgacagcggagacaacccgtacctcaagtacaaccacgccgacgcagagtttcaggagcgccttaaagaagatacgtcttttgggggcaacctcggacgagcagtcttccaggcgaaaaagagggttcttgaacctctgggcctggttgaggaacctgttaagacggctccgggaaaaaagaggccggtagagcactctcctgtggagccagactcctcctcgggaaccggaaaagcgggccagcagcctgcaagaaaaagattaaattttggtcagactggagacgcagactccgtacctgacccccagcctctcggacagccaccagcagccccctctggtctgggatctactacaatggctacaggcagtggcgcaccaatggcagacaataacgagggtgccgatggagtgggtaattcctcaggaaattggcattgcgattcccaatggctgggcgacagagtcatcaccaccagcacccgaacctgggccctgcccacatacaacaaccacctctacaagcaaatctccagccaatcaggagccagcaacgacaaccactactttggctacagcaccccctgggggtattttgacttcaacagattccactgccacttttcaccacgtgactggcaaagactcatcaacaacaactggggattccggcccaaaagactcaacttcaagctctttaatattcaagtcaaagaggtcacgcagaatggcggtacgacgacgattgccaataaccttaccagcacggttcaggtgtttactgactcggagtaccagctcccgtacgtcctgggctcggcgcatcaaggatgcctcccgccgtttccagcggacgtcttcatggtcccacagtatggatacctcaccctgaacaacgggagtcaggcggtaggacgctcttccttttactgcctggagtactttccttctcagatgctgcgtactggaaacaactttcagttcagctacacttttgaagacgtgcctttccacagcagctacgctcacagccagagtctggatcggctgatgaatcctctgatcgaccagtacctgtattatctgaacaagacacaaacaaatagtggaactcttcagcagtctcggctactgtttagccaagctggaccaaccaacatgtctcttcaagctaaaaactggctgcctggaccttgctacagacagcagcgtctgtcaaaacaggcaaacggcaacaacaacagcaactttccctggactgcagctacaaagtatcatctaaatggccgggactcgttggttaatccaggaccagctatggccagtcacaaggatgacgaagaaaagtttttccccatgcatggaaccctgatatttggtaaacaaggaacaaatgccaacgacgcggatttggaaaatgtcatgattacagatgaagaagaaatcagggccaccaatcccgtggctacggagcagtacgggactgtgtcaaataatttgcaaaactcaaacactggtccaactactggaactgtcaatcaccaaggagcgttacctggtatggtgtggcaggatcgagacgtgtacctgcagggacccatttgggccaagattcctcacaccgatggacactttcatccttctccactgacgggaggttttggactcaaacacccgcctcctcagatcatgatcaaaaacactcccgttccagccaatcctcccacaaacttcagttctgccaagtttgcttctttcatcacacagtattccacgggacaggtcagcgtggagatcgagtgggagctgcagaaggagaacagcaaacgctggaatcccgaaattcagtacacttccaactacaacaagtctgttaatgtggactttactgtggacactaatggtgtgtattcagagcctcgccccattggcaccagatacctgactcgtaatctgtaa

SEQ ID NO: 180 - protein, 735 aa, Adeno-associated virus
MAADGYLPDWLEDTLSEGIRQWWKLKPGPPPPKPAERHKDDSRGLVLPGYKYLGPFNGLDKGEPVNEADAAALEHDKAYDRQLDSGDNPYLKYNHADAEFQERLKEDTSFGGNLGRAVFQAKKRVLEPLGLVEEPVKTAPGKKRPVEHSPVEPDSSSGTGKAGQQPARKRLNFGQTGDADSVPDPQPLGQPPAAPSGLGSTTMATGSGAPMADNNEGADGVGNSSGNWHCDSQWLGDRVITTSTRTWALPTYNNHLYKQISSQSGASNDNHYFGYSTPWGYFDFNRFHCHFSPRDWQRLINNNWGFRPKRLNFKLFNIQVKEVTQNGGTTTIANNLTSTVQVFTDSEYQLPYVLGSAHQGCLPPFPADVFMVPQYGYLTLNNGSQAVGRSSFYCLEYFPSQMLRTGNNFQFSYTFEDVPFHSSYAHSQSLDRLMNPLIDQYLYYLNKTQTNSGTLQQSRLLFSQAGPTNMSLQAKNWLPGPCYRQQRLSKQANGNNNSNFPWTAATKYHLNGRDSLVNPGPAMASHKDDEEKFFPMHGTLIFGKQGTNANDADLENVMITDEEEIRATNPVATEQYGTVSNNLQNSNTGPTTGTVNHQGALPGMVWQDRDVYLQGPIWAKIPHTDGHFHPSPLTGGFGLKHPPPQIMIKNTPVPANPPTNFSSAKFASFITQYSTGQVSVEIEWELQKENSKRWNPEIQYTSNYNKSVNVDFTVDTNGVYSEPRPIGTRYLTRNL

SEQ ID NO: 181 - DNA, 2208 bp, Adeno-associated virus
atggctgccgatggttatcttccagattggctcgaggacactctctctgaaggaataagacagtggtggaagctcaaacctggcccaccaccaccaaagctcgcagagcggcatcaggacgacagcaggggtcttgtgcttcctgggtacaagtacctcggacccttcaacggactcgacaaaggagagccggtcaacgaggcagacgccgcggccctcgagcacgacaaggcctacgaccggcagctcgacagcggagacaacccgtacctcaagtacaaccacgccgacgcggagtttcaggagcgtcttaaagaagatacgtcttttgggggcaacctcggacgagcagtcttccaggcgaaaaagagggttcttgaacctctgggcctggttgaggaacctgttaagacggctccgggaaaaaagaggccggtagagcactctcctgtggagccagactcctcctcgggaaccggaaaggcgggccatcagcctgcgagaaagagattgaattttggtcagactggagacgcagactccgtacctgacccccagcctctcggacagccaccagcagcccccacaagtctgggatctactacaatggctacaggcagtggcgcaccaatggcagacaataacgagggtgccgatggagtgggtaattcctcaggaaattggcattgcgattcccaatggctgggcgacagagtcatcaccaccagcacccgaacctgggccctgcccacctacaacaaccacctctacaagcaaatctccagccaatcaggagcctcgaacgacaaccactactttggctacagcaccccctgggggtattttgacttcaacagattccactgtcacttctccccacgtgattggcaaagactcatcaacaacaactggggattccgacccaagagactcaacttcaagctctttaacattcaagtcaaagaggtcacgcagaatgacggtacgacgacgattgccaataaccttaccagcacggttcaggtgtttactgactcggagtaccagctcccgtacgtcctcggctcggcgcatcaaggatgcctcccgccgtttccagcggacgtcttcacggtcccacagtatggatacctcaccctgaacaacgggagtcaggcggtaggacgctcttccttttactgcctggagtactttccttctcagatgctgcgtactggaaacaaccttaccttcagctacacctttgaggacgttcctttccacagcagctacgctcacagccagagtttggaccggctgatgaatcctctgatcgaccagtatctatattatctgaacaggacacaatcaaatagtggaactcttcagcagtctaggctactgtttagccaagctggacccaccagcatgtctcttcaagctaaaaactggctgcctggaccttgctacagacagcagcgtctttcaaagcaggcaaacgacaacaacaacagcaactttccctggactgcggctacaaagtatcatctaaatggccgggactcgttggttaatccaggaccagctatggccagccacaaagacgatgaagaaaagtttttccccatgcatggaaccctgatatttggtaaacaaggaacaaatgctaacgacgcggatttggagcatgttatgattacagatgaagaagaaatcaggaccaccaatcctgtggctacagagcagtacggaaacgtgtcaaataatttgcaaaactcaaatactggtccaactacagaaaatgtcaatcaccagggagcgttacctggtatggtgtggcaggatcgagacgtgtacctgcagggacccatttgggccaagattcctcacaccgacggacactttcacccttctccactgatgggaggttttggactcaaacacccgcctcctcaaatcatgatcaaaaacactcccgttccagccaatcctcccacaaactacagttctgccaagtttgcttctttcatcacacagtattccacgggccaggtcagcgtggagattgagtgggagctgcggaaggagaacagcaaacgctggaaccccgagatccagtatacttccaactacaacaaatctgttaatgtggactttactgtggacactaatggtgtgtattcagagcctcgccccattggcaccagatacctgactcgtaatctgtaa

SEQ ID NO: 182 - protein, 735 aa, Adeno-associated virus
MAADGYLPDWLEDTLSEGIRQWWKLKPGPPPPKLAERHQDDSRGLVLPGYKYLGPFNGLDKGEPVNEADAAALEHDKAYDRQLDSGDNPYLKYNHADAEFQERLKEDTSFGGNLGRAVFQAKKRVLEPLGLVEEPVKTAPGKKRPVEHSPVEPDSSSGTGKAGHQPARKRLNFGQTGDADSVPDPQPLGQPPAAPTSLGSTTMATGSGAPMADNNEGADGVGNSSGNWHCDSQWLGDRVITTSTRTWALPTYNNHLYKQISSQSGASNDNHYFGYSTPWGYFDFNRFHCHFSPRDWQRLINNNWGFRPKRLNFKLFNIQVKEVTQNDGTTTIANNLTSTVQVFTDSEYQLPYVLGSAHQGCLPPFPADVFTVPQYGYLTLNNGSQAVGRSSFYCLEYFPSQMLRTGNNLTFSYTFEDVPFHSSYAHSQSLDRLMNPLIDQYLYYLNRTQSNSGTLQQSRLLFSQAGPTSMSLQAKNWLPGPCYRQQRLSKQANDNNNSNFPWTAATKYHLNGRDSLVNPGPAMASHKDDEEKFFPMHGTLIFGKQGTNANDADLEHVMITDEEEIRTTNPVATEQYGNVSNNLQNSNTGPTTENVNHQGALPGMVWQDRDVYLQGPIWAKIPHTDGHFHPSPLMGGFGLKHPPPQIMIKNTPVPANPPTNYSSAKFASFITQYSTGQVSVEIEWELRKENSKRWNPEIQYTSNYNKSVNVDFTVDTNGVYSEPRPIGTRYLTRNL

SEQ ID NO: 183 - DNA, 2208 bp, Adeno-associated virus
atggctgccgatggttatcttccagattggctcgaggacactctctctgaaggaataagacagtggtggaagctcaaacctggcccaccaccaccaaagcccgcagagcggcatcaggacgacagcaggggtcttgtgcttcctgggtacaagtacctcggacccttcaacggactcgacaaaggagagccggtcaacgaggcagacgccgcggccctcgagcacgacaaggcctacgaccggcagctcgacagcggagacaacccgtacctcaagtacaaccacgccgacgcggagtttcaggagcgtcttaaagaagatacgtcttttgggggcaacctcggacgagcagtcttccaggcgaaaaagagggttcttgaacctctgggcctggttgaggaacctgttaagacggctccgggaaaaaagaggccggtagagcactctcctgtggagccagactcctcctcgggaaccggaaaagcgggccatcagcctgcgagaaagagattgaattttggtcagactggagacgcagactccgtacctgacccccagcctctcggacagccaccagcagcccccacaagtttgggatctactacaatggctacaggcagtggcgcaccaatggcagacaataacgagggtgccgatggagtgggtaattcctcaggaaattggcattgcgattcccaatggctgggcgacagagtcatcaccaccagcacccgaacctgggccctgcccacctacaacaaccacctctacaagcaaatctccagccaatcaggagcctcgaacgacaaccactactttggctacagcaccccctgggggtattttgacttcaacagattccactgtcacttctccccacgtgattggcaaagactcatcaacaacaactggggattccgacccaagagactcaacttcaagctctttaacattcaagtcaaggaggtcacgcagaatgacggtacgacgacgattgccaataaccttaccagcacggttcaggtgtttactgactcggagtaccagctcccgtacgtcctcggctcggcgcatcaaggatgcctcccgccgtttccagcggacgtcttcatggtcccacagtatggatacctcaccctgaacaacgggagtcaggcggtaggacgctcttccttttactgcctggagtactttccttctcagatgctgcgtactggaaacaactttaccttcagctacacctttgaggacgttcctttccacagcagctacgctcacagccagagtttggaccggctgatgaatcctctgatcgaccagtatctatattatctgaacaggacacaatcaaatagtggaactcttcagcagtctaggctactgtttagccaagctggacccaccagcatgtctcttcaagctaaaaactggctgcctggaccttgctacagacagcagcgtctttcaaagcaggcaaacgacaacaacaacagcaactttccctggactgcggctacaaagtatcgtctaaatggccgggactcgttggttaatccaggaccagctatggccagccacaaagacgatgaagaaaagtttttccccatgcatggaaccctgatatttggtaaacaaggaacaaatgctaacgacgcggatttggagcatgttatgattacagatgaagaagaaatcaggaccaccaatcctgtggctacagagcagtacggaaacgtgtcaaataatttgcaaaactcaaatactggtccaactacagaaaatgtcaatcaccagggagcgttacctggtatggtgtggcaggatcgagacgtgtacctgcagggacccatttgggccaagattcctcacaccgacggacactttcacccttctccactgatgggaggttttggactcaaacacccgcctcctcaaatcatgatcaaaaacactcccgttccagccaatcctcccacaaacttcagttctgccaagtttgcttctttcatcacacagtattccacgggccaggtcagcgtggagattgagtgggagctgcagaaggagaacagcaaacgctggaaccccgagatccagtatacttccaactacaacaaatctgttaatgtggactttactgtggacactaatggtgtgtattcagagcctcgccccattggcaccagatacctgactcgtaatctgtaa

SEQ ID NO: 184 - protein, 735 aa, Adeno-associated virus
MAADGYLPDWLEDTLSEGIRQWWKLKPGPPPPKPAERHQDDSRGLVLPGYKYLGPFNGLDKGEPVNEADAAALEHDKAYDRQLDSGDNPYLKYNHADAEFQERLKEDTSFGGNLGRAVFQAKKRVLEPLGLVEEPVKTAPGKKRPVEHSPVEPDSSSGTGKAGHQPARKRLNFGQTGDADSVPDPQPLGQPPAAPTSLGSTTMATGSGAPMADNNEGADGVGNSSGNWHCDSQWLGDRVITTSTRTWALPTYNNHLYKQISSQSGASNDNHYFGYSTPWGYFDFNRFHCHFSPRDWQRLINNNWGFRPKRLNFKLFNIQVKEVTQNDGTTTIANNLTSTVQVFTDSEYQLPYVLGSAHQGCLPPFPADVFMVPQYGYLTLNNGSQAVGRSSFYCLEYFPSQMLRTGNNFTFSYTFEDVPFHSSYAHSQSLDRLMNPLIDQYLYYLNRTQSNSGTLQQSRLLFSQAGPTSMSLQAKNWLPGPCYRQQRLSKQANDNNNSNFPWTAATKYRLNGRDSLVNPGPAMASHKDDEEKFFPMHGTLIFGKQGTNANDADLEHVMITDEEEIRTTNPVATEQYGNVSNNLQNSNTGPTTENVNHQGALPGMVWQDRDVYLQGPIWAKIPHTDGHFHPSPLMGGFGLKHPPPQIMIKNTPVPANPPTNFSSAKFASFITQYSTGQVSVEIEWELQKENSKRWNPEIQYTSNYNKSVNVDFTVDTNGVYSEPRPIGTRYLTRNL

SEQ ID NO: 185 - DNA, 2208 bp, Adeno-associated virus
atggctgccgatggttatcttccagattggctcgaggacactctctctgaaggaataagacagtggtggaagctcaaacctggcccaccaccaccaaagcccgcagagcggcatcaggacgacagcaggggtcttgtgcttcctgggtacaagtacctcggacccttcaacggactcgacaaaggagagccggtcaacgaggcagacgccgcggccctcgagcacgacaaggcctacgaccggcagctcgacagcggagacaacccgtacctcaagtacaaccacgccgacgcggagtttcaggagcgtcttaaagaagatacgtcttttgggggcaacctcggacgagcagtcttccaggcgaaaaagagggttcttgaacctctgggcctggttgaggaacctgttaagacggctccgggaaaaaagaggccggtagagcactctcctgtggagccagactcctcctcgggaaccggaaaagcgggccatcagcctgcgagaaagagattgaattttggtcagactggagacgcagactccgtacctgacccccagcctctcggacagccaccagcagcccccacaagtttgggatctactacaatggctacaggcagtggcgcaccaatggcagacaataacgagggtgccgatggagtgggtaattcctcaggaaattggcattgcgattcccaatggctgggcgacagagtcatcaccaccagcacccgaacctgggccctgcccacctacaacaaccacctctacaagcaaatctccagccaatcaggagcctcgaacgacaaccactactttggctacagcaccccctgggggtattttgacttcaacagattccactgtcacttctccccacgtgattggcaaagactcatcaacaacaactggggattccgacccaagagactcaacttcaagctctttaacattcaagtcaaagaggtcacgcagaatgacggtacgacgacgattgccaataaccttaccagcacggttcaggtgtttactgactcggagtaccagctcccgtacgtcctcggctcggcgcatcaaggatgcctcccgccgtttccagcggacgtcttcatggtcccacagtatggatacctcaccctgaacaacgggagtcaggcggtaggacgcccttccttttactgcctggagtactttccttctcagatgctgcgtactggaaacaactttaccttcagctacacctttgaggacgttcctttccacagcagctacgctcacagccagagtttggaccggctgatgaatcctctgatcgaccagtatctatattatctgaacaggacacaatcaaatagtggaactcttcagcagtctaggctactgtttagccaagctggacccaccagcatgtctcttcaagctaaaaactggctgcctggaccttgctacagacagcagcgtctttcaaagcaggcaaacgacaacaacaacagcaactttccctggactgcggctacaaagtatcatctaaatggccgggactcgttggttaatccaggaccagctatggccagccacaaagacgatgaagaaaagtttttccccatgcatgggaccctgatatttggtaaacaaggaacaaatgctaacgacgcggatttggagcatgttatgattacagatgaagaagaaatcaggaccaccaatcctgtggctacagagcagtacggaaacgtgtcaaataatttgcaaaactcaaatactggtccaactacagaaaatgtcaatcaccagggagcgttacctggtatggtgtggcaggatcgagacgtgtacctgcagggacccatttgggccaagattcctcacaccgacggacactttcacccttctccactgatgggaggttttggactcaaacacccgcctcctcaaatcatgatcaaaaacactcccgttccagccaatcctcccacaaacttcagttctgccaagtttgcttctttcatcacacagtattccacgggccaggtcagcgtggagattgagtgggagctgcagaaggagaacagcaaacgctggaaccccgagatccagtatacttccaactacaacaaatctgttaatgtggactttactgtggacactaatggtgtgtattcagagcctcgccccattggcaccagatacctgactcgtaatctgtaa

SEQ ID NO: 186 - protein, 735 aa, Adeno-associated virus
MAADGYLPDWLEDTLSEGIRQWWKLKPGPPPPKPAERHQDDSRGLVLPGYKYLGPFNGLDKGEPVNEADAAALEHDKAYDRQLDSGDNPYLKYNHADAEFQERLKEDTSFGGNLGRAVFQAKKRVLEPLGLVEEPVKTAPGKKRPVEHSPVEPDSSSGTGKAGHQPARKRLNFGQTGDADSVPDPQPLGQPPAAPTSLGSTTMATGSGAPMADNNEGADGVGNSSGNWHCDSQWLGDRVITTSTRTWALPTYNNHLYKQISSQSGASNDNHYFGYSTPWGYFDFNRFHCHFSPRDWQRLINNNWGFRPKRLNFKLFNIQVKEVTQNDGTTTIANNLTSTVQVFTDSEYQLPYVLGSAHQGCLPPFPADVFMVPQYGYLTLNNGSQAVGRPSFYCLEYFPSQMLRTGNNFTFSYTFEDVPFHSSYAHSQSLDRLMNPLIDQYLYYLNRTQSNSGTLQQSRLLFSQAGPTSMSLQAKNWLPGPCYRQQRLSKQANDNNNSNFPWTAATKYHLNGRDSLVNPGPAMASHKDDEEKFFPMHGTLIFGKQGTNANDADLEHVMITDEEEIRTTNPVATEQYGNVSNNLQNSNTGPTTENVNHQGALPGMVWQDRDVYLQGPIWAKIPHTDGHFHPSPLMGGFGLKHPPPQIMIKNTPVPANPPTNFSSAKFASFITQYSTGQVSVEIEWELQKENSKRWNPEIQYTSNYNKSVNVDFTVDTNGVYSEPRPIGTRYLTRNL

SEQ ID NO: 187 - DNA, 2208 bp, Adeno-associated virus
atggctgccgatggttatcttccagattggctcgaggacactctctctgaaggaataagacagtggtggaagctcaaacctggcccaccaccaccaaagcccgcagagcggcataaggacgacagcaggggtcttgtgcttcctgggtacaagtacctcggacccttcaacggactcgacaagggagagccggtcaacgaggcagacgccgcggccctcgagcacgacaaggcctacgaccggcagctcgacagcggagacaacccgtacctcaagtacaaccacgccgacgcggagtttcaggagcgccttaaagaagatacgtcttttgggggcaacctcggacgagcagtcttccaggcaaaaaagagggttcttgaacctctgggcctggttgaggagcctgttaaaacggctccgggaaaaaagaggccggtagagcactctcctgcggagccagactcctcctcgggaaccggaaaagcgggccagcagcctgcaagaaaaagattgaatttcggtcagactggagacgcagactccgtacctgacccccagcctctcggacagccaccagcagccccctctggtctgggaactaatacgatggcttcaggcagtggcgcaccaatggcagacaataacgagggcgccgacggagtgggtaattcctcgggaaattggcattgcgattccacatggatgggcgacagagtcatcaccaccagcacccgaacttgggccctgcccacctacaacaaccatctctacaagcaaatctccagccaatcaggagccagcaacgacaaccactactttggctacagcaccccttgggggtattttgacttcaacagattccactgccacttttcaccacgtgactggcaaagactcatcaacaacaactggggattccggcccaagagactcaacttcaagctctttaacattcaagtcaaagaggtcacgcagaatgacggtacgacgacgattgccaataaccttaccagcacggttcaggtgtttactgactcggagtaccagctcccgtacgtcctcggctcggcgcatcaaggatgcctcccgccgttcccagcagacgtcttcatggtgccacagtatggatacctcaccctgaacaacgggagtcaggcagtaggacgctcttcattttactgcctggagtactttccttctcagatgctgcgtaccggaaacaactttaccttcagctacacctttgaggacgttcctttccacagcagctacgctcacagccagagtttggaccgtctcatgaatcctctcatcgaccagtacctgtattacttgagcagaacaaacactccaagcggaaccaccacgcagtccaggcttcagttttctcaggccggagcaagtgacattcgggaccagtctaggaactggcttcctggaccctgttaccgccagcagcgagtatcaaagacatctgcggataacaacaacagtgaatactcgtggactggagctaccaagtaccacctcaatggcagagactctctggtgaatccgggcccggccatggccagccacaaggacgatgaagaaaagttttttcctcagagcggggttctcatctttgggaagcaaggctcagagaaaacaaatgtggacattgaaaaggtcatgattacagacgaagaggaaatcaggaccaccaatcccgtggctacggagcagtatggttctgtatctaccaacctgcagggcggcaacacacaagcagctaccgcagatgtcaacacacaaggcgttcttccaggcatggtctggcaggacagagacgtgtacctgcaggggcccatctgggcaaagattccacacacggacggacattttcacccctctcccctcatgggcggattcggacttaaacaccctcctccacagattctcatcaagaacaccccggtacctgcgaatccttcgaccaccttcagtgcggcaaagtttgcttctttcatcacacagtattccacggggcaggtcagcgtggagatcgagtgggagctgcagaaggagaacagcaaacgctggaatcccgagatccagtacacttccaactacaacaaatctgttaatgtggactttactgttgacactaatggcgtgtattcagagcctcgccccattggcaccagatacctgactcgtaatctgtaa

SEQ ID NO: 188 - protein, 735 aa, Adeno-associated virus
MAADGYLPDWLEDTLSEGIRQWWKLKPGPPPPKPAERHKDDSRGLVLPGYKYLGPFNGLDKGEPVNEADAAALEHDKAYDRQLDSGDNPYLKYNHADAEFQERLKEDTSFGGNLGRAVFQAKKRVLEPLGLVEEPVKTAPGKKRPVEHSPAEPDSSSGTGKAGQQPARKRLNFGQTGDADSVPDPQPLGQPPAAPSGLGTNTMASGSGAPMADNNEGADGVGNSSGNWHCDSTWMGDRVITTSTRTWALPTYNNHLYKQISSQSGASNDNHYFGYSTPWGYFDFNRFHCHFSPRDWQRLINNNWGFRPKRLNFKLFNIQVKEVTQNDGTTTIANNLTSTVQVFTDSEYQLPYVLGSAHQGCLPPFPADVFMVPQYGYLTLNNGSQAVGRSSFYCLEYFPSQMLRTGNNFTFSYTFEDVPFHSSYAHSQSLDRLMNPLIDQYLYYLSRTNTPSGTTTQSRLQFSQAGASDIRDQSRNWLPGPCYRQQRVSKTSADNNNSEYSWTGATKYHLNGRDSLVNPGPAMASHKDDEEKFFPQSGVLIFGKQGSEKTNVDIEKVMITDEEEIRTTNPVATEQYGSVSTNLQGGNTQAATADVNTQGVLPGMVWQDRDVYLQGPIWAKIPHTDGHFHPSPLMGGFGLKHPPPQILIKNTPVPANPSTTFSAAKFASFITQYSTGQVSVEIEWELQKENSKRWNPEIQYTSNYNKSVNVDFTVDTNGVYSEPRPIGTRYLTRNL

SEQ ID NO: 189 - DNA, 3161 bp, Adeno-associated virus
gattgaatttagcggccgcgaattcgcccttgctgcgtcaactggaccaatgagaactttccattcaatgattgcgtcgacaagatggtgatctggtgggaggagggaaagatgaccgccaaggtcatggagtcggccaaagccattctcggaggaagcaaggtgcgcgtggaccagaaatgtaagtcctcggcccagatagacccgactcccgtgattgtcacctccaacaccaacatgtgcgccgtgattgacgggaactcaacgaccttcgagcaccagcagccgttgcaagaccggatgttcaaatttgaactcacccgccgtctggatcatgactttgggaaggtcaccaagcaggaagtcaaagactttttccggtgggcaaaggatcacgtggttgaggtggagcatgaattctacgtcaaaaagggtggagccaagaaaagacccgcccccagtgacgcagatataagtgagcccaaacgggcgcgcgggtcagttgcgcagccatcgacgtcagacgcggaagcttcgatcaactacgcggacaggtaccaaaacaaatgttctcgtcacgtgggcatgaatctgatgctgtttccctgcagacaatgcgagagaatgaatcaaaattcaaatatctgcttcactcacggacagaaggactgtttagagtgctttcccgtgtcagaatctcaacccgtttctgtcgtcaaaaaggcgtatcagaaactttgctacattcatcatatcatgggaaaggtgccagacgcttgcactgcctgcgatctggtcaatgtggatttggatgactgcatctctgaacaataaatgatttaaatcaggtatggctgccgatggttatcttccagattggctcaaggacactctctctgaaggaataagacagtggtggaagctcaaacctggcccaccaccaccaaagcccgcagagcggcataaggacgacagcgggggtcttgtgcttcctgggtacaagtacctcggacccttcaacggactcgacaagggagagccggtcaacgaggcagacgccgcggccctcgagtacgacaaggcctacgaccggcagctcgacagcggagacaacccgtacctcaagtacaaccacgccgacgcggagtttcaggagcgccttaaagaagatacgtcttttgggggcaacctcggacgagcagtcttccaggcgaaaaagagggttcttgaacctctgggcctggttgaggaacctgttaagacggctccgggaaaaaagaggccggtagagcactctcctgtggagccagactcctcctcgggaacaggaaaagcgggccagcagcctgcgagaaagagattgaattttggtcagactggagacgcagactccgtacctgacccccagcctctcggacagccaccagcagccccctctggtctgggaactaatacgatggctacaggcagtggcgcaccaatggcagacaataacgagggcgccgacggagtgggtaattcctcgggaagttggcattgcgattccacatggatgggcgacagagtcatcaccaccagcacccgaacctgggctctgcccacctacaacaaccatctgtacaagcagatctccagccaatcaggagccagcaacgacaaccactactttggctacagcaccccttgggggtattttgacttcaacagattccactgccacttttcaccacgtgactggcaaagactcatcaacaacaactggggattccggcccaagagactcaacttcaagctctttaacattcaagtcaaggaggtcacgcagaatgacggtacgacgacgattgccaataaccttaccagcacggttcaggtgtttactgactcggagtaccagctcccgtacgtccccggctcggcgcatcaaggatgcctcccgccgttcccagcagacgtcttcatggtgccacagtatggatacctcaccctgaacaacgggagtcaggcagtaggacgctcttcattttactgcctggagtactttccttctcagatgcttcgtaccggaaacaactttaccttcagctacacctttgaggatgttcctttccacagcagctacgctcacagccagagtttggaccgtctcatgaatcctctcatcgaccagtacctgtattacttgagcagaacaaacactccaagcggaaccaccacgcagtccaggcttcagttttctcaggccggagcaagtgacattcgggaccagtctaggaactggcttcctggaccctgttaccgccagcagcgagtatcaaagacagctgcggacaacaacaacagtgaatactcgtggactggagctaccaagtaccacctcaatggcagagactctctggtgaatccgggcccggccatggccagccacaaggacgatgaagaaaagttttttcctcaaagcggggttctcatctttgggaagcaaggctcagagaaaacaaatgtggacattgaaaaggtcatgattacagacgaagaggaaatcagaaccaccaatcccgtggccacggagcagtatggttctgtatctaccaacctccagagcggcaacacacaagcagctactgcagatgtcaacacacaaggcgttcttccaggcatggtctggcaggacagagacgtgcacctgcaggggcctatctgggcaaagattccacacacggacggacattttcacccctctcccctcatgggcggatttggacttaaacaccctcctccacagattctcatcaagaacaccccggtacctgcaaatccttcgaccaccttcagtgcggcaaagtttgcttccttcatcacacagtattccacagggcaggtcagcgtggagatcgagtgggagctgcagaaggagaacagcaaacgctggaaccccgagatccagtacacttccaactacaacaaatctgttaatgtggactttactgtggacactaatggtgtgtattcagagcctcgccccattggcaccagatacctgactcgtaatctgtaattgcttgttaatcaataaaccgtttaattcgtttcagttgaactttggtctctgcgaagggcgaattcgtttaaaccctgcaggactagtccctttagtgagg

SEQ ID NO: 190 - DNA, 3162 bp, Adeno-associated virus
gaattgaatttagcggccgcgaattcgcccttcgcagagaccaaagttcaactgaaacgaattaaacggtttattgattaacaagcaattacagattacgagtcaggtatctggtgccaatggggcgaggctctgaatacacgccattagtgtccacagtaaagtccacattaacagacttgttgtagttggaagtgtactgaatttcgggattccagcgtttgctgttttccttctgcagctcccactcgatctccacgctgacctgtcccgtggagtactgtgtgatgaaggaagcaaactttgccgcactgaaggtggtcgaaggattcgcaggtaccggggtgttcttgatgagaatctgtggaggagggtgtttaagtccgaatccacccatgaggggagaggggtgaaaatgtccgtccgtgtgtggaatctttgcccagatgggcccctgaaggtacacatctctgtcctgccagaccatgcctggaagaacgccttgtgtgttgacatctgcggtagctgcttgtctgttgcctctctggaggttggtagatacagaaccgtactgctccgtagccacgggattggttgtcctgatttcctcttcgtctgtaatcatgaccttttcaatgtccacatttgttttctctgagccttgcttcccaaagatgagaaccccgctctgaggaaaaaacttttcttcattgtccttgtggcttgccatggccgggcccggattcaccagagagtctctgccattgaggtggtacttggtagctccagtccacgagtattcactgttgttgttatccgcagatgtctttgatactcgctgctggcggtaacagggtccaggaagccagttcctagactggtcccgaatgtcactcgctccggcctgagaaaactgaagccttgactgcgtggtggttccacttggagtgtttgttgtgctcaagtaatacaggtactggtcgatgagaggattcatgagacggtccagactctggctgtgagcgtagccgctgtggaaaggaacgtcctcaaaagtgtagctgaaggtaaagttgtttccggtacgcagcatctgagaaggaaagtactccaggcagtaaaatgaagagcgtcctactgcctgactcccgttgttcagggtgaggtatccatactgtggcaccatgaagacgtctgctgggaacggcgggaggcatccttgatgcgccgagccgaggacgtacgggagctggtactccgagtcagtaaacacctgaaccgtgctggtaaggttattggcaatcgtcgtcgtaccgtcattctgcgtgacctctttgacttgaatgttaaagagcttgaagttgagtctcttgggtcggaatccccagttgttgttgatgagtctttgccagtcacgtggtgaaaagtggcagtggaatctgttgaagtcaaaatacccccaaggggtgctgtagccaaagtagtgattgtcgttcgaggctcctgattggctggaaatttgtttgtagaggtggttgttgtaggtgggcagggcccaggttcgggtgctggtggtgatgactctgtcgcccatccatgtggaatcgcaatgccaatttcccgaggaattacccactccgtcggcgccctcgttattgtctgccattggtgcgccactgcctgtagccatcgtattagttcccagaccagagggggctgctggtggctgtccgagaggctgggggtcaggtactgagtctgcgtctccagtctgaccaaaattcaatctttttcttgcaggctgctggcccgcctttccggttcccgaggaggagtctggctccacaggagagtgctctaccggcctcttttttcctggagccgtcttgacaggttccccaaccaggcccagaggttcaagaaccctctttttcgcctggaagactgctcgtccgaggttgcccccaaaagacgtatcttctttaaggcgctcctgaaactccgcgtcggcgtggttgtacttgaggtacgggttgtctccgctgtcgagctgccggtcgtaggctttgtcgtgctcgagggccgcggcgtctgcctcgttgaccggctctcccttgtcgagtccgttgaagggtccgaggtacttgtacccaggaagcacaagacccctgctgtcgtccttatgccgctctgcgggctttggtggtggtgggccaggtttgagcttccaccactgtcttattccttcagagagagtgtcctcgagccaatctggaagataaccatcggcagccatacctgatttaaatcatttattgttcaaagatgcagtcatccaaatccacattgaccagatcgcaggcagtgcaagcgtctggcacctttcccatgatatgatgaatgtagcacagtttctgatacgcctttttgacgacagaaacgggttgagattctgacacgggaaagcactctaaacagtctttctgtccgtgagtgaagcagatatttgaattctgattcattctctcgcattgtctgcagggaaacagcatcagattcatgcccacgtgacgagaacatttgttttggtacctgtctgcgtagttgatcgaagcttccgcgtctgacgtcgatggctgcgcaactgactcgcgcacccgtttgggctcacttatatctgcgtcactgggggcgggtcttttcttggctccaccctttttgacgtagaattcatgctccacctcaaccacgtgatcctttgcccaccggaaaaagtctttgacttcctgcttggtgaccttcccaaagtcatgatccagacggcgggtgagttcaaatttgaacatccggtcttgcaacggctgctggtgttcgaaggtcgttgagttcccgtcaatcacggcgcacatgttggtgttggaggtgacgatcacgggagtcgggtctatctgggccgaggacttgcatttctggtccacgcgcaccttgcttcctccgagaatggctttggccgactccacgaccttggcggtcatcttcccctcctcccaccagatcaccatcttgtcgacacagtcgttgaagggaaagttctcattggtccagttgacgcagcaagggcgaattcgtttaaacctgcaggactagtccctttagtgaggg

SEQ ID NO: 191 - DNA, 3164 bp, Adeno-associated virus
gcgaattgaatttagcggccgcgaattcgcccttcgcagagaccaaagttcaactgaaacgaattaaacggtttattgattaacaagcaattacaaattacgagtcaggtatctggtgccaatggggcgaggctctgaatacacgccattagtgtccacagtaaagtccacattaacagacttgttgtagttggaagtgtactgaatttcgggattccagcgtttgctgttttccttctgcagctcccactcgatctccacgctgacctgtcccgtggagtactgtgtgatgaaggaagcaaactttgccgcactgaaggtggtcgaaggattcgcaggtaccggggtgttcttgatgagaatctgtggaggagggtgtttaggtccgaatccacccatgaggggagaggggtgaaaatgtccgtccgtgtgtggaatctttgcccagatgggcccctgaaggtacacatctctgtcctgccagaccatgcctggaagaacgccttgtgtgttgacatctgcggtagctgcttgtctgttgcctctctggaggttggtagatacagaaccatactgctccgtagccacgggattggttgtcctgatttcctcttcgtctgtaatcatgaccttttcaatgtccacatttgttttctctgagccttgcttcccaaagatgagaaccccgctctgaggaaaaaacttttcttcattgtccttgtggcttgccatggccgggcccggattcaccagagagtctctgccattgaggtggtacttggtagctccagtccacgagtattcactgttgttgttatccgcagatgtctttgatactcgctgctggcggtaacagggtccaggaagccagttcctagactggtcccgaatgtcactcgctccggcctgagaaaactgaagccttgactgcgtggtggttccacttggagtgtttgttgtgctcaagtaatacaggtactggtcgatgagaggattcatgagacggtccagactctggctgtgagcgtagctgctgtggaaaggaacgtcctcaaaagtgtagctgaaggtaaagttgtttccggtacgcagcatctgagaaggaaagtactccgggcagtaaaatgaagagcgtcctactgcctgactcccgttgctcagggtgaggtatccatactgtggcaccatgaagacgtctgctgggaacggcgggaggcatccttgatgcgccgagccgaggacgtacgggagctggtactccgagtcagtaaacacctgaaccgtgctggtaaggttattggcaatcgtcgtcgtaccgtcattctgcgtgacctctttgacttgaatgttaaagagcttgaagttgagtctcttgggtcggaatccccagttgttgttgatgagtctttgccagtcacgtggtgaaaagtggcagtggaatctgttgaagtcaaaatacccccaaggggtgctgtagccaaagtagtgattgtcgttcgaggctcctgattggctggaaatttgtctgtagaggtggttgttgtaggtgggcagggcccaggttcgggtgctggtggtgatgactctgtcgcccatccatgtggaatcgcaatgccgatttcccgaggaattacccactccgtcggcgccctcgttattgtctgccattggtgcgccactgcctgtagccatcgtattagttcccagaccagagggggctgctggtggctgtccgagaggctgggggtcaggtactgagtctgcgtctccagtctgaccaaaattcaatctttttcttgcaggctgctggcccgcctttccggttcccgaggaggagtctggctccacaggagagtgctctaccggcctcttttttcccggagccgtcttaacaggttccccaaccaggcccagaggttcaagaaccctctttttcgcctggaagactgctcgtccgaggttgcccccaaaagacgtatcttctttaaggcgctcctgaaactccgcgtcggcgtggttgtacttgaggtacgggttgtctccgctgtcgagctgccggtcgtaggctttgtcgtgctcgagggccgcggcgtctgcctcgttgaccggctctcccttgtcgagtccgttgaagggtccgaggtacttgtacccaggaagcacaagacccctgctgtcgtccttatgccgctctgcgggctttggtggtggtgggccaggtttgagcttccaccactgtcttattccttcagagagagtgtcctcgagccaatctggaagataaccatcggcagccatacctgatttaaatcatttattgttcaaagatgcagtcatccaaatccacattgaccagatcgcaggcagtgcaagcgtctggcacctttcccatgatatgatgaatgtagcacagtttctgatacgcctttttgacgacagaaacgggttgagattctgacacgggaaagcactctaaacagtctttctgtccgtgagtgaagcagatatttgaattctgattcattctctcgcattgtctgcagggaaacagcatcagattcatgcccacgtgacgagaacatttgttttggtacctgtctgcgtagttgatcgaagcttccgcgtctgacgtcgatggctgcgcaactgactcgcgcacccgtttgggcccacttatatctgcgtcactgggggcgggtcttttcttggctccaccctttttgacgtagaattcatgctccacctcaaccacgtgatcctttgcccaccggaaaaagtctttgacttcctgcttggtgaccttcccaaagtcatgatccagacggcgggtgagttcaaatttgaacatccggtcttgcaacggctgctggtgttcgaaggtcgttgagttcccgtcaatcacggcgcacatgttggtgttggaggtgacgatcacgggagtcgggtctatctgggccgaggacttgcatttctggtccacgcgcaccttgcttcctccgagaatggctttggccgactccacgaccttggcggtcatcttcccctcctcccaccagatcaccatcttgtcgacacagtcgttgaagggaaagttctcattggtccagttgacgcagcaagggcgaattcgtttaaacctgcaggactagtccctttagtgaggg

SEQ ID NO: 192 - DNA, 3163 bp, Adeno-associated virus
accctcactaaagggactagtcctgcaggtttaaacgaattcgcccttgctgcgtcaactggagcaatgagaactttcccttcaacgactgtgtcgacaagatggtgatttggtgggaggaggggaagatgaccgccaaggtcgtggagtcggccaaagccattctcggaggaagcaaggtgcgcgtggaccagaaatgcaagtcctcggcccagatagatccgactcccgtgatcgtcacctccaacaccaacatgtgcgccgtgattgacgggaactcaacgaccttcgaacaccagcagccgttgcaagaccggatgttcaaatttgaactcacccgccgtctggatcatgactttgggaaggtcaccaagcaggaagtcaaagactttttccggtgggcaaaggatcacgtggttgaggtggagcatggattctacgtcaaaaagggtggagccaagaaaagacccgcccctagtgacgcagatataagtgagcccaaacgggtgcgcgagtcagttgcgcagccatcgacgtcggacgcggaagcttcgatcaactacgcggacaggtaccaaaacaaatgttctcgtcacgtgggcatgaatctgatgctgtttccctgcagacaatgcgagagaatgaatcaaaattcaaatatctgcttcactcacggacagaaagactgtttagagtgctttcccgtgtcagaatctcaacctgtttctgtcgtcaaaaaggcgtatcagaaactgcgctacattcatcatatcatgggaaaggtgccagacgcttgcactgcctgcgatctggtcaatgtggatttggatgactgcatctctgaacaataaatgatttaaatcaggtatggctgccgatggttatcttccagattggctcgaggacactctctctgaaggaataagacagtggtggaagctcaaacctggcccaccaccaccaaagcccgcagagcggcataaggacgacagcaggggtcttgtgcttcctgggtacaagtacctcggacccttcaacggactcgacaagggagagccggtcaacgaggcagacgccgcggccctcgagcacgacaaggcctacgaccggcagctcgacagcggagacaacccgtacctcaagtacaaccacgccgacgcggagtttcaggagcgtcttaaagaagatacgtcttttgggggcaacctcggacgagcagtcttccaggcgaaaaagagggttcttgaacctctgggcctggttgaggaacctgttaagacggctccgggaaaaaagaggccggtagagcactctcctgcggagccagactcctcctcgggaaccggaaaagcgggccagcagcctgcaagaaaaagactgaatttcggtcagactggagacgcagactccgtacctgacccccagcctctcggacagccaccagcagcccccacaagtttgggatctactacaatggctacaggcagtggcgcaccaatggcagacaataacgagggtgccgatggagtgggtaattcctcaggaaattggcattgcgattcccaatggctgggcgacagagtcatcaccaccagcacccgaacctgggccctgcccacctacaacaaccacctttacaagcaaatctccagccaatcaggagcctcaaacgacaaccactactttggctacagcaccccctgggggtattttgacttcaacagattccactgccacttttcaccacgtgactggcaaagactcatcaacaacaactggggattccgacccaagagactcaacttcaagctctttaacattcaagtcaaagaggtcacgcagaatgacggtacgacgacgattgccaataaccttaccagcacggttcaggtgtttactgactcggagtaccagctcccgtacgtcctcggctcggcgcatcaaggatgcctcccgccgtttccagcggacgtcttcatggtcccacagtatggatacctcaccctgaacaacgggagtcaggcggtaggacgctcttccttttactgcctggagtgctttccttctcagatgctgcgtactggaaacaactttcagttcagctacacttttgaagacgtgcctttccacagcagctacgctcacagccagagtttggatcggctgatgaatcctctgatcgaccagtacctgtattatctaaacagaacacaaacagctagtggaactcagcagtctcggctactgtttagccaagctggacccacaagcatgtctcttcaagctaaaaactggctgcctggaccgtgttatcgccagcagcgtttgtcaaagcaggcaaacgacaacaacaacagcaactttccctggactggagctaccaagtaccacctcaatggcagagactctttggtgaacccgggcccggccatggccagccacaaggacgatgaagaaaagtttttccccatgcatggaaccctaatatttggtaaagaaggaacaaatgctaccaacgcggaattggaaaatgtcatgattacagatgaagaggaaatcaggaccaccaatcccgtggctacagagcagtacggatatgtgtcaaataatttgcaaaactcaaatactgctgcaagtactgaaactgtgaatcaccaaggagcattacctggtatggtgtggcaggatcgagacgtgtacctgcagggacccatttgggccaagattcctcacaccgatggacactttcatccttctccactgatgggaggttttggactcaaacacccgcctcctcagattatgatcaaaaacactcccgttccagccaatcctcccacaaacttcagttctgccaagtttgcttccttcatcacacagtattccacgggacaggtcagcgtggagatcgagtgggagctgcagaaggagaacagcaaacgctggaatcccgaaattcagtacacttccaactacaacaaatctgttaatgtggactttactgtggacactaatggtgtgtattcagagcctcgccccattggcaccagatacctgactcgtaatctgtaattgcttgttaatcaataaaccgtttaattcgtttcagttgaactttggtctctgcgaagggcgaattcgcggccgctaaattcaattcgcc

SEQ ID NO: 193 - protein, 735 aa, Adeno-associated virus
MAADGYLPDWLEDTLSEGIRQWWKLKPGPPPPKPAERHKDDSRGLVLPGYKYLGPFNGLYKGEPVDEADAAALEHDKAYDRQLDSGDNPYLKYNHADAEFQERLKEDTSFGGNLGRAVFQAKKRVLEPLGLVGEPVKTAPGKKRPVEHSPVEPDSSSGTGKAGNQPARKRLNFGQTGDADSVPDPQPLGQPPAAPSGLGSTTMATGSGAPVADNNEGADGVGNSSGNWHCDSQWLGDRVITTSTRTWALPTYNNHLYKQISSQSGASNDNHYFGYSTPWGYFDFNRFHCHFSPRDRQRLINNNWGFRPKRLNFKLFNIQVKEVTQNDGTTTIANNLTSTVQVFTDSGYQLPYVLGLAHQGCLPPFPADVFMVPQYGYLTLNNGSQAVGRSSFYCLEYFPSQMLRTGNNFQFSYTFEDVPFHSSYAHSQSLDRLMNPLIDQYLYYLNKTQSNSGTLQQSRLLFSQAGPTSMSLQAKNWLPGPCYRQQRLSKQANDNNNSNFPWTAATKYHLNGRDSLVNPGPAMASHKDDEEKFFPMHGTLIFGKQGTNANDADLDNVMITDEEEIRTTNPVATEQYGYVSNNLQNSNTGPTTGTVNHQGALPGMVWQDRDVYLQGPIWAKIPHTDGHFHPSPLMGGFGLKHPPPQIMIKNTPVPANPPTNFSSAKFASFITQYSTGQVSVEIEWELQKEDSKRWNPEIQYTSNYNKPVNVDFTVDTNGVYSEPRPIGTRYLTRNL

SEQ ID NO: 194 - DNA, 2208 bp, Adeno-associated virus
atggctgccgatggttatcttccagattggctcgaggacactctctctgaaggaataagacagtggtggaagctcaaacctggcccaccaccaccaaagcccgcagagcggcataaggacgacagcaggggtcttgtgcttcctgggtacaagtacctcggacccttcaacggactctacaagggagagccggtcgacgaggcagacgccgcggccctcgagcacgacaaggcctacgaccggcagctcgacagcggagacaacccgtacctcaagtacaaccacgccgacgcggagtttcaggagcgccttaaagaagatacgtcttttgggggcaacctcggacgagcagtcttccaggccaaaaagagggttcttgaacctctgggcttggttggggagcctgttaaaacggctccgggaaaaaagaggccggtagagcactctcctgtggagccagactcctcctcgggaaccggaaaagcgggcaaccagcctgcaagaaaaagattgaattttggtcagactggagacgcagactccgtacctgacccccagcctctcggacagccaccagcagccccctctggtctgggatctactacaatggctacaggcagtggcgcaccagtggcagacaataacgagggtgccgatggagtgggtaattcctcaggaaattggcattgcgattcccaatggctgggcgacagagtcatcaccaccagcacccgaacctgggctctgcccacctacaataaccacctctacaagcaaatctccagccaatcaggagcctcaaacgacaaccactactttggctacagcaccccctgggggtattttgacttcaacagattccactgccacttttcaccacgtgaccggcaaagactcatcaacaacaactggggattccgaccaaaaagactcaacttcaagctctttaacattcaagtcaaagaggtcacgcagaatgacggtacgacgacgattgccaataaccttaccagcacggttcaggtgtttactgactcggggtaccagctcccgtacgtcctcggcttggcgcatcaaggatgcctcccgccgttcccagcagacgtcttcatggtgccacagtatggatacctcaccctgaacaacgggagtcaggcggtaggacgctcttccttttactgcctggagtactttccttctcagatgctgcgtactggaaacaactttcagttcagctacacctttgaagacgttcctttccacagcagctacgctcacagccagagtctggatcggctgatgaatcctctgatcgaccagtacctgtattatctgaacaagacacaatcaaatagtggaactcttcagcagtctcggctactgtttagccaagctggacccaccagcatgtctcttcaagctaaaaactggctgcctggaccttgctacagacagcagcgtctgtcaaagcaggcaaacgacaacaacaacagcaactttccctggactgcggctacaaagtatcatctaaatggccgggactcgttggttaatccaggaccagctatggccagccacaaagacgatgaagaaaagtttttccccatgcatggaaccctgatatttggtaaacaaggaacaaatgctaacgacgcggatttggacaatgtcatgattacagatgaagaagaaatccgcaccaccaatcccgtggctacggagcagtacggatatgtgtcaaataatttgcaaaactcaaatactggtccaactactggaactgtcaatcaccaaggagcgttacctggtatggtgtggcaggatcgagacgtgtacctgcagggacccatttgggccaagattcctcacaccgatggacactttcatccttctccacttatgggaggttttggactcaaacacccacctcctcagatcatgattaaaaacactcccgttccagccaatcctcccacaaacttcagttctgccaagtttgcttctttcatcacacagtattccacgggacaagtcagcgtggagatcgagtgggagctgcagaaggaggacagcaaacgctggaaccccgagatccagtacacttccaactataacaaacctgttaatgtggactttactgtggacactaatggtgtgtattcagagcctcgccccattggcaccagatacctgactcgtaatctgtaa

SEQ ID NO: 195 - DNA, 3161 bp, Adeno-associated virus
cgaattgatttagcggccgcgaattcgcccttcgcagagaccaaagttcaactgaaacgaattaaacggtttattgattaacaagcaattacagattacgagtcaggtatctggtgccaatggggcgaggctctgaatacacaccattagtgtccacagtaaagtccacattaacagatttgttgtagttggaagtgtactggatctcgggattccagcgtttgctgttctccttctgtagctcccactcgatctccacgctgacccgccccgtggaatactgtgtgatgaaggaagcaaactttgccgcactgaaggtggtcgaaggattcgcaggtaccggggtgtttttgatgagaatctgtggaggagggtgtttaagtccgaatccgcccatgaggggagaggggtgaaaatgtccgtccgtgtgcggaatctttgcccagataggcccctgcaggtacacgtctctgtcctgccagaccatgcctggaagaacgccttgtgtgttgacatctgcagtagatgcttgtgtgttgccgctctggaggttggtagatacagaaccatactgctccgtggccacgggattggtggttctgatttcctcttcgtctgtaatcatgaccttttcaatgtccacatttgttttctctgatccttgttttccaaagatgagaaccccgctctgaggaaaaaacttttcttcatcgtccttgtggctggccattgccgggcccggattcaccagagagtctctgccattgaggtggtacttggtagctccaatccacgagtattcactgttgttgttgtccgcagatgtctttgatactcgctgctggcggtaacagggtccaggaagccagttcctagactgatcccgaatgtcactcgctccggcctgagaaaactgaagcctggactgcgtggtggttccgcttggagtgtttgttctgctcaagtaatacaggtactggtcgatgagaggattcatgagacggtccaaactctggctgtgagcgtagctgctgtggaaaggaacatcctcaaaggtgtagctgaaggtaaagttgtttccggtacgcagcatctgagaagggaagtactccaggcagtaaaatgaagagcgtcctactgcctgactcccgttgttcagggtgaggtatccatactgtggcaccatgaagacgtctgctgggaacggcgggaggcatccttgatgcgccgagccgaggacgtacgggagctggtactccgagtcagtaaacacctgaaccgtgctggtaaggttattggcaatcgtcgtcgtaccatcattctgcgtgacctctctgacttgaatgttaaagagcttgaagttgagtctcttgggccggaatccccagttgttgttgatgagtctttgccagtcacgtggtgaaaagtggcagtggaatctgttgaagtcaaaatacccccaaggggtgctgtagccaaagtagtggttgtcgttgctggctcctgattggctggaaatctgcttgtacagatggttgttgtaggtgggcagagcccaggttcgggtgctggtggtgatgactctgtcgcccatccatgtggaatcgcaatgccaatttcccgaggaattacccactccgtcggcgccatcgttattgtctgccattggtgcgccactgcctgtagccatcgtattagttcccagaccagagggggctgctggtggctgtccgagaggctgggggtcaggtacggagtctgcgtctccagtctgaccgaaattcaatctctttcttgcaggctggttgcccgcttttccggttcccgaggaggagtctggctccacaggagagtgctctaccggcctcttttttcccggagccgtcttaacaggctcctcaaccaggcccagaggttcaagaaccctcttttttgcctggaagactgctcgtccgaggttgcccccaaaagacgtatcttctttaaggcgctcctgaaactccgcgtcggcgtggtcgtacttgaggtacgggttgtctccgctgtcgagctgccggtcgtaggccttgtcgtgctcgagggccgcggcgtctgcctcgttgaccggctctcccttgtcgagtccgttgaagggtccgaggtacttgtacccaggaagcacaagacccctgctgtcgtccttatgccgctctgcgggctttggtggtggtgggccaggtttgagcttccaccactgtcttattccttcagagagagtgtcctcgagccaatctggaagataaccatcggcagccatacctgatttaaatcatttattgttcagagatgcagtcatccaaatccacattgaccagatcgcaggcagtgcaagcgtctggcacctttcccatgatatgatgaatgtagcaaagtttctgatacgcctttttgacgacagaaacgggttgagattctgacacgggaaagcactctaaacagtctttctgtccgtgagtgaagcagatatttgaattctgattcattctctcgcattgtctgcagggaaacagcatcagattcatgcccacgtgacgagaacatttgttttggtacctgtccgcgtagttgatcgaagcttccgcgtctgacgtcgatggctgcgcaactgactcgcgcgcccgtttgggctcacttatatctgcgtcactgggggcgggtcttttcttggctccaccctttttgacgtagaattcatgctccacctcaaccacgtgatcctttgcccaccggaaaaagtctttcacttcctgcttggtgaccttcccaaagtcatgatccagacggcgggttagttcaaatttgaacatccggtcttgcaacggctgctggtgttcgaaggtcgttgagttcccgtcaatcacggcgcacatgttggtgttggaggtggcgatcacgggagtcgggtctatctgggccgaggacttgcacttttggtccacgcgcaccttgcttcctccgagaatggcttcggccgattccacgaccttggcggtcatctttccctcctcccaccagatcaccatcttgtcgacacagtcgttgaagggaaagttctcattggtccagttgacgcagcaagggcgaattcgtttaaacctgcaggaactagtcccttagtgagg

SEQ ID NO: 196 - protein, 735 aa, Adeno-associated virus
MAADGYLPDWLEDTLSEGIRQWWKLKPGPPPPKPAERHKDDSRGLVLPGYKYLGPFNGLYKGEPVNEADAAALEHDKAYDRQLDSGDNPYLKYNHAGAEFQERLKEDTSFGGNLGRAVFQAKKRVLEPLGLVEEPVKTAPGKKRPVEHSPVEPDSSSGTGKAGNQPARKRLNFGQTGDADSVPDPQPLGQPPAAPSGLGSTTMATGSGAPVADNNEGADGVGNSSGNWHCDSQWLGDRVITTSTRTWALPTYNNHLYKQISSQSGASNDNHYFGYSTPWGYFDFNRFHCHFSPRDWQRLINNNWGFRPKRLNFKLFNIQVKEVTQNDGTTTIANNLTSTVQVFTDSEYQLPYVLGSAHQGCLPPFPADVFMVPQYGYLTLNNGSQAVGRSSFYCLEYFPSQMLRTGNNFQFSYTFEDVPFHSSYAHSQSLDRLMNPLIDQYLYYLNKTQSNSGTLQQSRLLFSQAGPTSMSLQAKNWLPGPCYRQQRLSKQANDNNNSNFPWTAATKYHLNGRDSLVNPGPAMASHKDDEEKFFPMHGTLIFGKQGTNANDADLDNVMITDEEEIRTTNPVATEQYGYVSNNLQDSNTGPTTGTVNHQGALPGMVWQDRDVYLQGPIWAKIPHTDGHFHPSPLMGGFGLKHPPPQIMIKNTPVPANPPTNFSSAKFASFITQYSTGQVSVEIEWELQKENSKRWNPEIQYTSNYNKSVNVDFTVDTNGVYSEPRPIGTRYLTRNL

SEQ ID NO: 197 - DNA, 2208 bp, Adeno-associated virus
atggctgccgatggttatcttccagattggctcgaggacactctctctgaaggaataagacagtggtggaagctcaaacctggcccaccaccgccaaagcccgcagagcggcataaggacgacagcaggggtcttgtgcttcctgggtacaagtacctcggacccttcaacggactctacaagggagagccggtcaacgaggcagacgccgcggccctcgagcacgacaaggcctacgaccggcagctcgacagcggagacaacccgtacctcaagtacaaccacgccggcgcggagtttcaggagcgccttaaagaagatacgtcttttgggggcaacctcggacgagcagtcttccaggccaaaaagagggttcttgaacctctgggcttggttgaggagcctgttaaaacggctccgggaaaaaagaggccggtagagcactctcctgtggagccagactcctcctcgggaaccggaaaagcgggcaaccagcctgcaagaaaaagattgaattttggtcagactggagacgcagactccgtacctgacccccagcctctcggacagccaccagcagccccctctggtctgggatctactacaatggctacaggcagtggcgcaccagtggcagacaataacgagggtgccgatggagtgggtaattcctcaggaaattggcattgcgattcccaatggctgggcgacagagtcatcaccaccagcacccgaacctgggctctgcccacctacaacaaccacctctacaagcaaatctccagccaatcaggagcctcaaacgacaaccactactttggctacagcaccccctgggggtattttgacttcaacagattccactgccacttttcaccacgtgactggcaaagactcatcaacaacaactggggattccgaccaaagagactcaacttcaagctctttaacattcaagtcaaagaggtcacgcagaatgacggtacgacgacgattgccaataaccttaccagcacggttcaggtgtttactgactcggagtaccagctcccgtacgtcctcggctcggcgcatcaaggatgcctcccgccgttcccagcagacgtcttcatggtgccacagtatggatacctcaccctgaacaacgggagtcaggcggtaggacgctcttccttttactgcctggagtactttccttctcagatgctgcgtactggaaacaactttcagttcagctacacctttgaagacgttcctttccacagcagctacgctcacagccagagtctggatcggctgatgaatcctctgatcgaccagtacctgtattatctgaacaagacacaatcaaatagtggaacccttcagcagtctcggctactgtttagccaagctggacccaccagcatgtctcttcaagctaaaaactggctgcctggaccttgctacagacagcagcgtctgtcaaagcaggcaaacgacaacaacaacagcaactttccctggactgcggctacaaagtatcatctaaatggccgggactcgttggttaatccaggaccagctatggccagccacaaagacgatgaagaaaagtttttccccatgcatggaaccctgatatttggtaaacaaggaacaaatgctaacgacgcggatttggacaatgtcatgattacagatgaagaagaaatccgcaccaccaatcccgtggctacggagcagtacggatatgtgtcaaataatttgcaagactcaaatactggtccaactactggaactgtcaatcaccaaggagcgttacctggtatggtgtggcaggatcgagacgtgtacctgcagggacccatttgggccaagattcctcacaccgatggacactttcatccttctccacttatgggaggttttggactcaaacacccacctcctcagatcatgattaaaaacactcccgttccagccaatcctcccacaaacttcagttctgccaagtttgcttctttcatcacacagtattccacgggacaagtcagcgtagagatcgagtgggagctgcagaaggagaacagcaaacgctggaaccccgagatccagtacacttccaactataacaaatctgttaatgtggactttactgtggacactaatggtgtgtattcagagcctcgccccattggcaccagatacctgactcgtaatctgtaa

SEQ ID NO: 198 - protein, 738 aa, Adeno-associated virus
MAADGYLPDWLEDNLSEGIREWWDLKPGAPKPKANQQKQDDGRGLVLPGCKYLGPFNGLDKGEPVNAADAAALEHDKAYDQQLKAGDNPYLRYNHADAEFQERLQEDTSFGGNLGRAVFQAKKRVLEPLGLVEEGAKTAPGKKRPVEPSPQRSPDSSTGIGKTGQQPAKKRLNFGQTGDSESVPDPQPIGEPPAGPSGLGSGTMAAGGGAPMADNNEGADGVGSSSGNWHCDSTWLGDRVITTSTRTWALPTYNNHLYKQISNGTSGGSTNDNTYFGYSTPWGYFDFNRFHCHFSPRDWQRLINNNWGFRPKRLNFKLFNIQVKEVTQNEGTKTIANNLTSTIQVFTDSEYQLPYVLGSAHQGCPPPFPADVFMIPQYGYLTLNNGSQAVGRSSFYCLEYFPSQMRRTGNNFEFSYQFEDVPFHSSYAHSQSLDRLMNPLIDQYLYYLSRTQSTGGTAGTQQLLFSQAGPNNMSAQAKNWLPGPCYRQQRVSTTLSQNNNSNFAWTGATKYHLNGRDSLVNPGVAMATHKDDEERFFPSSGVLMFGKQGAGKDNVDYSSVMLTSEEEIKTTNPVATEQYGVVADNLQQQNAAPIVGAVNSQGALPGMVWQNRDVYLQGPIWAKIPHTDGNFHPSPLMGGFGLKHPPPQILIKNTPVPADPPTTFSQAKLASFITQYSTGQVSVEIEWELQKENSKRWNPEIQYTSNYNKSVNVDFTVDTNGVYSEPRPIGTRYLTRNL

SEQ ID NO: 199 - DNA, 2217 bp, Adeno-associated virus
atggctgccgatggttatcttccagattggctcgaggacaacctctctgagggcattcgcgagtggtgggacttgaaacctggagccccgaaacccaaagccaaccagcaaaagcaggacgacggccggggtctggtgcttcctggctgcaagtacctcggacccttcaacggactcgacaagggggagcccgtcaacgcggcggacgcagcggccctcgagcacgacaaggcctacgaccagcagctcaaagcgggtgacaatccgtacctgcggtataaccacgccgacgccgagtttcaggagcgtctgcaagaagatacgtcttttgggggcaacctcgggcgagcagtcttccaggccaagaagcgggttctcgaacctctcggtctggttgaggaaggcgctaagacggctcctggaaagaagagaccggtagagccatcaccccagcgttctccagactcctctacgggcatcggcaagacaggccagcagcccgcgaaaaagagactcaactttgggcagactggcgactcagagtcagtgcccgaccctcaaccaatcggagaaccccccgcaggcccctctggtctgggatctggtacaatggctgcaggcggtggcgctccaatggcagacaataacgaaggcgccgacggagtgggtagttcctcaggaaattggcattgcgattccacatggctgggcgacagagtcatcaccaccagcacccgaacctgggccctccccacctacaacaaccacctctacaagcaaatctccaacgggacatcgggaggaagcaccaacgacaacacctacttcggctacagcaccccctgggggtattttgactttaacagattccactgccacttctcaccacgtgactggcagcgactcatcaacaacaactggggattccggcccaagagactcaacttcaagctcttcaacatccaggtcaaggaggtcacgcagaatgaaggcaccaagaccatcgccaataaccttaccagcacgattcaggtctttacggactcggaataccagctcccgtacgtcctcggctctgcgcaccagggctgcccgcctccgttcccggcggacgtcttcatgattcctcagtacgggtacctgactctgaacaacggcagtcaggccgtgggccgttcctccttctactgcctggagtactttccttctcaaatgcggagaacgggcaacaactttgagttcagctaccagtttgaggacgtgccttttcacagcagctacgcgcatagccaaagcctggaccggctgatgaaccccctcatcgaccagtacctgtactacctgtctcggactcagtccacgggaggtaccgcaggaactcagcagttgctattttctcaggccgggcctaataacatgtcggctcaggccaaaaactggctacccgggccctgctaccggcagcaacgcgtctccacgacactgtcgcaaaataacaacagcaactttgcttggaccggtgccaccaagtatcatctgaatggcagagactctctggtaaatcccggtgtcgctatggcaacgcacaaggacgacgaagagcgattttttccatccagcggagtcttgatgtttgggaaacagggagctggaaaagacaacgtggactatagcagcgttatgctaaccagtgaggaagaaatcaaaaccaccaacccagtggccacagaacagtacggcgtggtggccgataacctgcaacagcaaaacgccgctcctattgtaggggccgtcaacagtcaaggagccttacctggcatggtctggcagaaccgggacgtgtacctgcagggtcctatctgggccaagattcctcacacggacggcaactttcatccttcgccgctgatgggaggctttggactgaaacacccgcctcctcagatcctgattaagaatacacctgttcccgcggatcctccaactaccttcagtcaagccaagctggcgtcgttcatcacgcagtacagcaccggacaggtcagcgtggaaattgaatgggagctgcagaaagagaacagcaagcgctggaacccagagattcagtatacttccaactataacaaatctgttaatgtggactttactgtggacactaatggtgtgtattcagagcctcgccccattggcaccagatacctgactcgtaatctgtaa

SEQ ID NO: 200 - DNA, 3167 bp, Adeno-associated virus
attgaatttagcggccgcgaattcgcccttcgcagagaccaaagttcaactgaaacgaattaaacggtttattgattaacaagcaattacagattacgagtcaggtacctggtgccaatggggcgaggctctgaatacacaccattagtgtccacagtaaagtccacattaacagatttgttgtagttggaagtgtactgaatctcgggattccagcgtttgctgttctccttctgcagctcccactcgatctccacgctgacctgccccgtggagtactgtgtaatgaaggaagcaaactttgccgcactgaaggtagtcgaaggattcgcaggtaccggggtgttcttgatgagaatctgcgggggagggtgtttaagtccgaatccgcccatgaggggagaggggtgaaaatgtccgtccgtgtgtggaatctttgcccagatgggcccctgcaggtacacgtctctgtcctgccacaccatgcctggaagaacgccttgtgtgttgacatctgaggtagctgcttgtgtgttgccgctctggaggttggtagatacagaaccatactgctccgtagccacgggattggtggtcctgatttcctcttcgtctgtaatcatgaccttttcaatgtccacattagtttttcccgagtcttgttttccaaagatgagaaccccgctctgaggaaaaaacttttcttcatcgtccttgtggctggccatggccgggcccggattcaccagagagtctcttccattaaggtggtacttggtagctccagtccacgagtattcactgttgttgttatccgcagatgtctttgatactcgctgctggcggtaacagggtccaggaagccagttcctagactggtcccgaatgtcacttgctccggcctgagaaaactgaagccttgactgcgtggtggttccgcttggagtgtttgttctgctcaagtaatacaggtactggtcgatgagaggattcatgagacggtccaaactctggctgtgggcgtagctgctgtggaaaggaacgtcctcaaaggtgtagctgaaggtaaagttgtttccggtacgcagcatctgagaaggaaagtactccaggcagtaaaatgaagagcgtcctactgcctgactcccgttgttcagggtgaggtatccatactgtggcaccatgaagacgtctgctgggaacggcgggaggcatccttgatgcgccgagccgaggacgtacgggagctggtactccgagtcagtaaacacctgaaccgtgctggtaaggttattggcaatcgtcgtcgtaccgtcattctgcgtgacctccttgacttgaatgttaaagagcttgaagttgagtcttttgggccggaatccccaattgttgttgatgagtctttgccagtcacgtggcgaaaagtggcagtggaatctgttgaagtcaaaatacccccaaggggtgctgtagccaaagtagtggttgtcgtttgaggctcctgattggctggaaatctgcttgtagaggtggttgttgtaggtgggcagagcccaggtgcgggtgctggtggtgatgactctgtcgcccatccatgtggaatcgcaatgccaatttcccgaggaattacccactccgtcggcgccctcgttattgtctgccattggtgcgccactgcctgtagccatcgtattagttcccagaccagagggggctgctggtggctgtccgagaggctgggggtcaggtacggagtctgcgtctccagtctgaccgaaattcaatctctttcttgcaggctgctggcccgcttttccggttcccgaggaggagtctggctccgcaggagagtgctctaccggcctcttttttcccggagccgtcttaacaggttcctcaaccaggcccagaggttcaagaaccctctttttcgcctggaagactgctcgtccgaggttgcccccaaaagacgtatcttctttaagacgctcctggaactccgcgtcggcgtggttgtacttggggtacgggttgtctccgctgtcgagctgccggtcgtaggccttgtcgtgctcgagggccgcggcgtctgcctcgttgaccggctctcccttgtcgagtccgttgaagggtccaaggtacttgtacccaggaagcacaagacccctgctgtcgtccttatgccgctctgcgggctttggtggtggtgggccaggtttgagcttccaccactgtcttattccttcagagagagtgtcctcgagccaatctggaagataaccatcggcagccatacctgatttaaatcatttattgttcagagatgcagtcatccaaatccacattgaccagatcgcaagcagtgcaagcgtctggcacctttcccatgatatgatgaatgtagcacagtttctgatacgcctttttgacgacagaaacgggttgagattctgacacgggaaagcactctaaacagtctttctgtccgtgagtgaagcagatatttgaattctgattcattctctcgcattgtctgcagggaaacagcatcagattcatgcccacgtgacgagaacatttgttttggtacctgtccgcgtagttgattgaagcttccgcgtctgacgtcgatggctgcgcaactgactcgcgcgcccgtttgggctcacttatatctgcgtcactgggggcgggtctttttttggctccaccctttttgacgtagaattcatgctctacctcaaccacgtgatcctttgcccaccggaaaaagtctttgacttcctgcttggtgaccttcccaaagtcatgatccagacggcgggtgagttcaaatttgaacatccggtcttgcaacggctgctggtgttcgaaggtcgttgagttcccgtcaatcactgcgcacatgttggtgttggaggtgacaatcacgggagtcgggtctatctgggccgaggacttgcatttctggtccacgcgcaccttgcttcctccgagaatggctttggccgactccacgaccttggcggtcatcttcccctcctcccaccagatcaccatcttgtcgacgcaatcattgaaaggaaagttctcattggtccagttgacgcagccgtagaaagggcgaattcgtttaaacctgcaggactagtccctttagtgagggt

SEQ ID NO: 201 - DNA, 3161 bp, Adeno-associated virus
aattgaatttagcggccgcgaattcgcccttcgcagagaccaaagttcaactgaaacgaattaaacggtttattgattaacaagcaattacagattacgagtcaggtatctggtgccaatggggcgaggctctgaatacacaccattagtgtccacagtaaagtccacattaacagatttgttgtagttggaagtgtactgaatctcgggattccagcgtttgctgttctccttctgcagctcccactcgatctccacgctgacctgccccgtggagtactgtgtaatgaaggaagcaaactttgccgcactgaaggtagtcgaaggattcgcaggtaccggggtgttcttgatgagaatctgcgggggagggtgtttaagtccgaatccgcccatgaggggagaggggtgaaaatgtccgtccgtgtgtggaatctttgcccagatgggcccctgcaggtacacgtctctgtcctgccacaccatgcctggaagaacgccttgtgtgttgacatctgaggtagctgcttgtgtgttgccgctctggaggttggtagatacagaaccatactgctccgtagccacgggattggtggtcctgatttcctcttcgtctgtaatcatgaccttttcaatgtccacattagtttttcccgagtcttgttttccaaagatgagaaccccgctctgaggaaaaaacttttcttcatcgtccttgtggctggccatggccgggcccggattcaccagagagtctcttccattaaggtggtacttggtagctccagtccacgagtattcactgttgttgttatccgcagatgtctttgatactcgctgctggcggtaacagggtccaggaagccagttcctagactggtcccgaatgtcacttgctccggcctgagaaaactgaagccttgactgcgtggtggttccgcttggagtgtttgttctgctcaagtaatacaggtactggtcgacgagaggattcatgagacggtccaaactctggctgtgggcgtagctgctgtggaaaggaacgtcctcaaaggtgtagctgaaggtaaagttgtttccggtacgcagcatctgagaaggaaagtactccaggcagtaaaatgaagagcgtcctactgcctgactcccgttgttcagggtgaggtatccatactgtggcaccatgaagacgtctgctgggaacggcgggaggcatccttgatgcgccgagccgaggacgtacgggagctggtactccgagtcagtaaacacctgaaccgtgctggtaaggttattggcaatcgtcgtcgtaccgtcattctgcgtgacctccttgacttgaatgttaaagagcttgaagttgagtcttttgggccgggatccccaattgttgttgatgagtctttgccagtcacgtggcgaaaagtggcagtggaatctgttgaagtcaaaatacccccaaggggtgctgtagccaaagtagtggttgtcgtttgaggctcctgattggctggaaatctgcctgtagaggtggttgttgtaggtgggcagagcccaggtgcgggtgctggtggtgatgactctgtcgcccatccatgtggaatcgcaatgccaatttcccgaggaattacccactccgtcggcgccctcgttattgtctgccattggtgcgccactgcctgtagccatcgtattagttcccagaccagagggggctgctggtggctgtccgagaggctgggggtcaggtacggagtctgcgtctccagtctgaccgaaattcaatctccttcttgcaggctgctggcccgcttttccggttcccgaggaggagtctggctccgcaagagagtgctctaccggcctcttttttcccggagccgtcttaacaggttcctcaaccaggcccagaggttcaagaaccctctttttcgcctggaagactgctcgtccgaggttgcccccaaaagacgtatcttctttaagacgctcctggaactccgcgtcggcgtggttgtacttgaggtacgggttgtctccgccgtcgagctgccggtcgtaggccttgtcgtgctcgagggccgcggcgtctgcctcgttgaccggctctcccttgtcgagtccgttgaagggtccaaggtacttgtacccaggaagcacaagacccctgctgtcgtccttatgccgctctgcgggctttggtggtggtgggccaggtttgagcttccaccactgtcttattccttcagagagagtgtcctcgagccaatctggaagataaccatcggcagccatacctgatttaaatcatttattgttcagagatgcagtcatccaaatccacattgaccagatcgcaagcagtgcaagcgtctggcacctttcccatgatatgatgaatgtagcacagtttctgatacgcctttttgacgacagaaacgggttgagattctgacacgggaaagcactctaaacagtctttctgtccgtgagtgaagcagatatttgaattctgattcattctctcgcattgtctgcagggaaacagcatcagattcatgcccacgtgacgagaacatttgttttggtacctgtccgcgtagttgattgaagcttccgcgtctgacgtcgatggctgcgcaactgactcgcgcgcccgtttgggctcacttatatctgcgtcactgggggcgggtctttttttggctccaccctttttgacgtagaattcatgctctacctcaaccacgtgatcctttgcccaccggaaaaagtctttgacttcctgcttggtgaccttcccaaagtcatgatccagacggcgggtgagttcaaatttgaacatccggtcttgcaacggctgctggtgttcgaaggtcgttgagttcccgtcaatcactgcgcacatgttggtgttggaggtgacaatcacgggagtcgggtctatctgggccgaggacttgcatttctggtccacgcgcaccttgcttcctccgagaatggctttggccgactccacgaccttggcggtcatcttcccctcctcccaccagatcaccatcttgtcgacgcaatcattgaaaggaaagttctcattggtccagttgacgcagcaagggcgaattcgtttaaacctgcaggactagtccctttagtgaggg

SEQ ID NO: 202 - DNA, 3172 bp, Adeno-associated virus
gattgaatttagcggccgcgaattcgcccttgctgcgtcaactggaccaatgagaactttcccttcaacgattgcgtcgacaagatggtgatctggtgggaggagggcaagatgaccgccaaggtcgtggagtccgccaaggccattctgggtggaagcaaggtgcgcgtggaccaaaagtgcaagtcatcggcccagatcgaccccacgcccgtgatcgtcacctccaacaccaacatgtgcgccgtgatcgacgggaacagcaccaccttcgagcaccagcagcccctgcaggaccgcatgttcaagttcgagctcacccgccgtctggagcacgactttggcaaggtgaccaagcaggaagtcaaagagttcttccgctgggctcaggatcacgtgactgaggtggcgcatgagttctacgtcagaaagggcggagccaccaaaagacccgcccccagtgacgcggatataagcgagcccaagcgggcctgcccctcagttgcggagccatcgacgtcagacgcggaagcaccggtggactttgcggacaggtaccaaaacaaatgttctcgtcacgcgggcatgcttcagatgctgtttccctgcaagacatgcgagagaatgaatcagaatttcaacgtctgcttcacgcacggggtcagagactgctcagagtgcttccccggcgcgtcggaatctcaacccgtcgtcagaaaaaagacgtatcagaaactgtgcgcgattcatcatctgctggggcgggcacccgagattgcgtgttcggcctgcgatctcgtcaacgtggacttggatgactgtgtttctgagcaataaatgacttaaaccaggtatggctgctgacggttatcttccagattggctcgaggacaacctctctgagggcattcgcgagtggtgggacctgaaacctggagcccccaagcccaaggccaaccagcagaagcaggacgacggccggggtctggtgcttcctggctacaagtacctcggacccttcaacggactcgacaagggggagcccgtcaacgcggcggacgcagcggccctcgagcacgacaaggcctacgaccagcagctcaaagcgggtgacaatccgtacctgcggtataaccacgccgacgccgagtttcaggagcgtctgcaagaagatacgtcttttgggggcaacctcgggcgagcagtcttccaggccaagaagcgggttctcgaacctctcggtctggttgaggaagctgctaagacggctcctggaaagaagagaccggtagaaccgtcacctcagcgttcccccgactcctccgcgggcatcggcaagaaaggccagcagcccgctaaaaagagactgaactttggtcagactggcgactcagagtcagtccccgaccctcaaccaatcggagaaccaccagcaggcccctctggtctgggatctggtacaatggctgcaggcggtggcgctccaatggcagacaataacgaaggcgccgacggagtgggtagttcctcaggaaattggcattgcgattccacatggctgggcgacagagtcatcaccaccagcacccgaacctgggccctgcccacctacaacaaccacctctacaagcaaatatccaatgggacatcgggaggaagcaccaacgacaacacctacttcggctacagcaccccctgggggtattttgacttcaacagattccactgccacttctcaccacgtgactggcagcgactcatcaacaacaactggggattccggccaaaaagactcagcttcaagctcttcaacatccaggtcaaggaggtcacgcagaatgaaggcaccgagaccatcgccaataaccttaccagcacgattcaggtatttacggactcggaataccagctgccgtacgtcctcggctccgcgcaccagggctgcctgcctccgttcccggcggacgtcttcatgattccccagtacggctaccttacactgaacaatggaagtcaagccgtaggccgttcctccttctactgcctggaatattttccatctcaaatgctgcgaactggaaacaattttgaattcagctacaccttcgaggacgtgcctttccacagcagctgcgcacacagccagagctcggaccgactgatgaatcctctcatcgaccagtacctgtactacttatccagaactcggtccacaggaggaactcaaggtacccagcaattgttattttctcaagctgggcctgcaaacatgtcggctcaggctaagaactggctacctggaccttgctaccggcagcagcgagtctctacgacactgtcgcaaaacaacaacagcaactttgcttggactggtgccaccaaatatcacctgaacggaagagactctttggtaaatcccggtgtcgccatggcaacccacaaggacgacgaggaacgcttcttcccgtcgagtggagtcctgatgtttggaaaacagggtgctggaagagacaatgtggactacagcagcgttatgctaaccagcgaagaagaaattaaaaccactaaccctgtagccacagaacaatacggtgtggtggctgacaacttgcagcaaaccaatacagggcctattgtgggaaatgtcaacagccaaggagccttacctggcatggtctggcagaaccgagacgtgtacctgcagggtcccatctgggccaagattcctcacacggacggcaacttccacccttcaccgctaatgggaggatttggactgaagcacccacctcctcagatcctgatcaagaacacgccggtacctgcggatcctccaacaacgttcagccaggcgaaattggcttccttcattacgcagtacagcaccggacaggtcagcgtggaaatcgagtgggagctgcagaaggagaacagcaaacgctggaacccagagattcagtacacttcaaactactacaaatctacaaatgtggactttgctgtcaatacagagggaacttattctgagcctcgccccattggtactcgttacctcacccgtaatctgtaattgctggttaatcaataaaccgtttgattcgtttcagttgaactttggtctctgcgaagggcgaattcgtttaaacctgcaggactagtccctttagtgagg

SEQ ID NO: 203 - DNA, 3172 bp, Adeno-associated virus
gattgaatttagcggccgcgaattcgcccttgctgcgtcaactggaccaatgagaactttcccttcaacgattgcgtcgacaagatggtgatctggtgggaggagggcaagatgaccgccaaggtcgtggagtccgccaaggccattctgggtggaagcaaggtgcgcgtggaccaaaagtgcaagtcatcggcccagatcgaccccacgcccgtgatcgtcacctccaacaccaacatgtgcgccgtgatcggcgggaacagcaccaccttcgagcaccagcagcccctgcaggaccgcatgttcaagttcgagctcacccgccgtctggagcacgactttggcaaggtgaccaagcaggaagtcaaagagttcttccgctgggctcaggatcacgtgactgaggtggcgcatgagttctacgtcagaaagggcggagccaccaaaagacccgcccccagtgacgcggatataagcgagcccaagcgggcctgcccctcagttgcggagccatcgacgtcagacgcggaagcaccggtggactttgcggacaggtaccaaaacaaatgttctcgtcacgcgggcatgcttcagatgctgtttccctgcaagacatgcgagagaatgaatcagaatttcaacgtctgcttcacgcacggggtcagagactgctcagagtgcctccccggcgcgtcagaatctcaacccgtcgtcagaaaaaagacgtatcagaaactgtgcgcgattcatcatctgctggggcgggcacccgagattgcgtgttcggcctgcgatctcgtcaacgtggacttggatgactgtgtttctgagcaataaatgacttaaaccaggtatggctgctgacggttatcttccagattggctcgaggacaacctctctgagggcattcgcgagtggtgggacctgaaacctggagcccccaagcccaaggccaaccagcagaagcaggacgacggccggggtctggtgcttcttggctacaagtacctcggacccttcaacggactcgacaagggggagcccgtcaatgcggcggacgcagcggccctcgagcacgacaaggcctacgaccagcagctcaaagcgggtgacaatccgtacctgcggtataaccacgccgacgccgagtttcaggagcgtctgcaagaagatacgtcttttgggggcaacctcgggcgagcagtcttccaggccaagaagcgggttctcgaacctctcggtctggttgaggaagctgctaagacggctcctggaaagaagagaccggtagaaccgtcacctcagcgttcccccgactcctccacgggcatcggcaagaaaggccagcagcccgctaaaaagagactgaactttggtcagactggcgactcagagtcagtccccgaccctcaaccaatcggagaaccaccagcaggcccctctggtctgggatctggtacaatggctgcaggcggtggcgctccaatggcagacaataacgaaggcgccgacggagtgggtagttcctcaggaaattggcattgcgattccacatggctgggcgacagagtcatcaccaccagcacccgaacctgggccctgcccacctacaacaaccacctctacaagcaaatatccaatgggacatcgggaggaagcaccaacgacaacacctacttcggctacagcaccccctgggggtattttgacttcaacagattccactgccacttctcaccacgtgactggcagcgactcatcaacaacaactggggattccggccaaaaagactcagcttcaagctcttcaacatccaggtcaaggaggtcacgcagaatgaaggcaccaagaccatcgccaataaccttaccagcacgattcaggtatttacggactcggaataccagctgccgtacgtcctcggctccgcgcaccagggctgcctgcctccgttcccggcggacgtcttcatgattccccagtacggctaccttacactgaacaatggaagtcaagccgtaggccgttcctccttctactgcctggaatattttccatctcaaatgctgcgaactggaaacaattttgaattcagctacaccttcgaggacgtgcctttccacagcggctacgcacacagccagagcttggaccgactgatgaatcctctcatcgaccagtacctgtactacttatccagaactcagtccacaggaggaactcaaggtacccagcaattgttattttctcaagctgggcctgcaaacatgtcggctcaggctaagaactggctacctggaccttgctaccggcagcagcgagtctctacgacactgtcgcaaaacaacaacagcaactttgcttggactggtgccaccaaatatcacctgaacggaagagactctttggtaaatcccggtgtcgccatggcaacccacaaggacgacgaggaacgcttcttcccgtcgagtggagtcctgatgtttggaaaacagggtgctggaagagacaatgtggactacagcagcgttatgctaaccagcgaagaagaaattaaaaccactaaccctgtagccacagaacaatacggtgtggtggctgacaacttgcagcaaaccaatacagggcctattgtgggaaatgtcaacagccaaggagccttacctggcatggtctggcagaaccgagacgtgtacctgcagggtcccatctgggccaagattcctcacacggacggcaacttccacccttcaccgctaatgggaggatttggactgaagcacccacctcctcagatcctgatcaagaacacgccggtacctgcggatcctccaacgacgttcagccaggcgaaattggcttccttcattacgcagtacagcaccggacaggtcagcgtggaaatcgagtgggagctgcagaaggagaacagcaaacgctggaacccagagattcagtacacttcaaactactacaaatctacaaatgtggactttgctgtcaatacagagggaacttattctgagcctcgccccattggtactcgttacctcacccgtaatctgtaattgctggttaatcaataaaccgtttgattcgtttcagttgaactttggtctctgcgaagggcgaattcgtttaaacctgcaggactagtccctttagtgagg

SEQ ID NO: 204 - DNA, 2208 bp, Adeno-associated virus
atggctgccgatggttatcttccagattggctcgaggacactctctctgaaggaataagacagtggtggaagctcaaacctggcccaccaccaccaaagcccgcagagcggcataaggacgacagcaggggtcttgtgcttcctgggtacaagtacctcggacccttcaacggactcgacaagggagagccggtcaacgaggcagacgccgcggccctcgagcacgacaaggcctacgaccggcagctcgaaagcggagacaacccgtacctcaagtacaaccacgccgacgcggagtttcaggagcgtcttaaagaagatacgtcttttgggggcaacctcggacgagcagtcttccaggcgaaaaagagggttcttgaacctctgggcctggttgaggagcctgttaaaacggctccgggaaaaaagaggccggtagagcactctcctgtggagccagactcctcctcgggaaccggaaaagcgggccagcagcctgcgagaaaaagattgaattttggtcagactggagacgcagactccgtacctgacccccagcctctcggacagccaccagcagccccctctggtctgggatctactacaatggcttcaggcagtggcgcaccagtggcagacaataacgagggtgccgatggagtgggtaattcctcaggaaattggcattgcgattcccaatggctgggcgacagagtcatcaccaccagcacccgaacctgggccctgcccacctacaacaaccacctctacaagcaaatctccagccaatcaggagcctcaaacgacaaccactactttggctacagcaccccctgggggtattttgacttcaacagattccactgccacttttcaccacgtgactggcaaagactcatcaacaacagctggggattccgacccaaaagactcaacttcaagctctttaacattcaagtcaaagaggtcacgcagaatgacggtacgacgacgattgccaataaccttaccagcacggttcaagtgtttaccgactcggagtaccagctcccgtacgtcctcggctcggcgcatcaaggatgcctcccgccgttcccagcagacgtctttatggtcccacagtatggatacctcaccctgaacaacgggagtcaggcggtaggacgctcttccttttactgcctggagtactttccttctcagatgctgcgtactggaaacaactttcagttcagctacacctttgaagacgttcccttccacagcagctacgctcacagccagagtctggatcggctgctgaatcctctgatcgaccagtacctatattatctgaacaagacacaatcaaatagtggaactcttcagcagtctcggctactgtttagccaagctggacccaccagcatgtctcttcaagctaaaaactggctgcctggaccttgctacagacagcagcgtctgtcaaagcaggcaaacgacaacaacaacagcaactttccctggactgcggctacaaagtatcatctaaatggccgggactcgttggttaatccaggaccagctatggccagccacaaagacgatgaagaaaagtttttccccatgcatggaaccctgatatttggtaaacaaggaacaaatgctaacgacgcggatttggacaatgtcatgattacagatgaagaagaaatccgcaccaccaatcccgtggctacggagcagtacggatatgtgtcaaataatttgcaaaactcaaatactggtccaactactggaactgtcaatcaccaaggagcgttacctggtatggtgtggcaggatcgagacgtgtacctgcagggacccatttgggccaagattcctcacacggacgggcactttcatccttctccactaatgggaggttttgggctcaaacacccgcctcctcagatcatgatcaaaaacactcccgttccagccaatcctcctacaaacttcagttcttccaagtttgcttctttcatcacacagtattccacggggcaggtcagcgtggagatcgagtgggagctgcagaaggagaacagcaaacgctggaatcccgaaattcagtatacttccaactacaacaaatctgttaatgtggactttactgtggacactaatggtgtgtattcagagcctcgccccattggcaccagatacccgactcgtaatctgtaa

SEQ ID NO: 205 - protein, 735 aa, Adeno-associated virus
MAADGYLPDWLEDTLSEGIRQWWKLKPGPPPPKPAERHKDDSRGLVLPGYKYLGPFNGLDKGEPVNEADAAALEHDKAYDRQLESGDNPYLKYNHADAEFQERLKEDTSFGGNLGRAVFQAKKRVLEPLGLVEEPVKTAPGKKRPVEHSPVEPDSSSGTGKAGQQPARKRLNFGQTGDADSVPDPQPLGQPPAAPSGLGSTTMASGSGAPVADNNEGADGVGNSSGNWHCDSQWLGDRVITTSTRTWALPTYNNHLYKQISSQSGASNDNHYFGYSTPWGYFDFNRFHCHFSPRDWQRLINNSWGFRPKRLNFKLFNIQVKEVTQNDGTTTIANNLTSTVQVFTDSEYQLPYVLGSAHQGCLPPFPADVFMVPQYGYLTLNNGSQAVGRSSFYCLEYFPSQMLRTGNNFQFSYTFEDVPFHSSYAHSQSLDRLLNPLIDQYLYYLNKTQSNSGTLQQSRLLFSQAGPTSMSLQAKNWLPGPCYRQQRLSKQANDNNNSNFPWTAATKYHLNGRDSLVNPGPAMASHKDDEEKFFPMHGTLIFGKQGTNANDADLDNVMITDEEEIRTTNPVATEQYGYVSNNLQNSNTGPTTGTVNHQGALPGMVWQDRDVYLQGPIWAKIPHTDGHFHPSPLMGGFGLKHPPPQIMIKNTPVPANPPTNFSSSKFASFITQYSTGQVSVEIEWELQKENSKRWNPEIQYTSNYNKSVNVDFTVDTNGVYSEPRPIGTRYPTRNL

SEQ ID NO: 206 - DNA, 2208 bp, Adeno-associated virus
atggctgccgatggttatcttccagattggctcgaggacactctctctgaaggaataagacagtggtggaagctcaaacctggcccaccaccaccaaagcccgcagagcggcataaggacgacagcaggggtcttgtgcttcctgggtacaagtacctcggacccttcaacggactcgacaagggagagccggtcaacgaggcagacgccgcggccctcgagcacgacaaggcctacgaccggcagctcgacagcggagacaacccgtacctcaagtacaaccacgccgacgcggagtttcaggagcgtcttaaagaagatacgtcttttgggggcaacctcggacgagcagtcttccaggccaaaaagaggattcttgaacctctgggcctggttgaggaacctgttaagacggctccgggagaaaagaggccggtagagcactctcctgcggagccagactcctcctcgggaaccggaaaagcgggccagcagcctgcaagaaagagattgaattttggccagactggagacgcagactcagtacctgacccccagcctctcggacagccaccagcagccccctctggtctgggaactaatacgatggcttcaggcagtggcgcaccaatggcagacaataacgagggcgccgacggagtgggtaattcctcgggaaattggtattgcgattccacatggatgggcgacagagtcatcaccaccagcacccgcacctgggccctgcccacctacaacaaccatctgtacaagcaaatctccagccagtctggagccagcaacgacaaccactactttggctacagcaccccctgggggtattttgacttcaacagattccactgccacttctccccacgtgactggcaaagactcatcaacaacaactggggattccggcccaagagactcagcttcaagctctttaacattcaagtcaaagaggtcacgcagaatgacggtacgacgacgattgccaataaccttaccagcacggttcaggtgtttactgactcggagtaccagctcccgtacgtcctcggctcggcgcatcaaggatgcctcccgccgttcccagcagacgtcttcatggtgccacagtatggatacctcaccctgaacaacggcagtcaggcggtaggacgctcttccttttactgcctggagtactttccttctcagatgcttcgtaccggaaacaactttaccttcagctacacctttgaagacgttcctttccatagcagctacgctcacagccaaagtctggaccgtctcatgaatcctctcatcgaccagtacctgtattacttgagcagaacaaacactccaagcggaaccaccacgatgtccaggcttcagttttctcaggccggagcaagtgacattcgggaccagtctagaaactggcttcctggaccctgttaccgccagcagcgagtatcaaagacagctgcggacaacaacaacagtgattactcgtggactggagctaccaagtaccacctcaatggaagagactctctggtgaatccgggcccagctatggccagccacaaggacgatgaagaaaaatattttcctcagagcggggttctcatctttggaaaacaagactcgggaaaaactaatgtggacattgaaaaggttatgattacagacgaagaggaaatcaggaccaccaatcccgtggctacggagcagtatggttctgtatctaccaacctccagagcggcaacacacaagcagctacctcagatgtcaacacacaaggcgttcttccaggcatggtctggcaggacagagacgtgtacctgcaggggcccatctgggcaaagattccacacacggacggacattttcacccctctcccctcgtgggcggattcggacttaaacaccctcctccacaaattctcatcaagaacaccccggtacctgcgaatccttcgaccactttcagtgcggcaaagtttgcttccttcatcacacagtactccacggggcaggtcagcgtggagatcgagtgggagctgcagaaggagaacagcaaacgctggaatcccgaaattcagtacacttccaactacaacaaatctgttaatgtggactttactgtggacactaatggtgtgtattcagagcctcgccccattggcaccagatacctgactcgtaatctgtaa

SEQ ID NO: 207 - protein, 735 aa, Adeno-associated virus
MAADGYLPDWLEDTLSEGIRQWWKLKPGPPPPKPAERHKDDSRGLVLPGYKYLGPFNGLDKGEPVNEADAAALEHDKAYDRQLDSGDNPYLKYNHADAEFQERLKEDTSFGGNLGRAVFQAKKRILEPLGLVEEPVKTAPGEKRPVEHSPAEPDSSSGTGKAGQQPARKRLNFGQTGDADSVPDPQPLGQPPAAPSGLGTNTMASGSGAPMADNNEGADGVGNSSGNWYCDSTWMGDRVITTSTRTWALPTYNNHLYKQISSQSGASNDNHYFGYSTPWGYFDFNRFHCHFSPRDWQRLINNNWGFRPKRLSFKLFNIQVKEVTQNDGTTTIANNLTSTVQVFTDSEYQLPYVLGSAHQGCLPPFPADVFMVPQYGYLTLNNGSQAVGRSSFYCLEYFPSQMLRTGNNFTFSYTFEDVPFHSSYAHSQSLDRLMNPLIDQYLYYLSRTNTPSGTTTMSRLQFSQAGASDIRDQSRNWLPGPCYRQQRVSKTAADNNNSDYSWTGATKYHLNGRDSLVNPGPAMASHKDDEEKYFPQSGVLIFGKQDSGKTNVDIEKVMITDEEEIRTTNPVATEQYGSVSTNLQSGNTQAATSDVNTQGVLPGMVWQDRDVYLQGPIWAKIPHTDGHFHPSPLVGGFGLKHPPPQILIKNTPVPANPSTTFSAAKFASFITQYSTGQVSVEIEWELQKENSKRWNPEIQYTSNYNKSVNVDFTVDTNGVYSEPRPIGTRYLTRNL

SEQ ID NO: 208 - DNA, 2209 bp, Adeno-associated virus
atggctgccgatggttatcctccagattggctcgaggacactctctctgaagggataagacagtggtggaagctcaaacctggcccaccaccaccaaagcccgcagagcggcataaggacgacagcaggggtcttgtgcttcctgggtacaagtacctcggacccttcaacggactcgacaagggggagccggtcaacgaggcagacgccgcggccctcgagcacgacaaggcctacgaccggcagctcgacagcggagacaacccgtacctcaagtacaaccacgccgacgcagagtttcaggagcgccttaaagaagatacgtcttttgggggcaacctcggacgagcagtcttccaggcgaaaaagagggttcttgaacctctgggcctggttgaggaacctgttaagacggctccgggaaaaaagaggccggtagagcactctcctgtggagccagactcctcctcgggaaccggaaaagcgggccagcggcctgcaagaaaaagattaaattttggtcagactggagacgcagactccgtacctgacccccagcctctcggacagccaccagcagccccctctggtctgggatctactacaatggctacaggcagtggcgcaccaatggcagacaataacgagggtgccgatggagtgggtaattcctcaggaaattggcattgcgattcccaatggctgggcgacagagtcatcaccaccagcacccgaacctgggccctgcccacatacaacaaccacctctacaagcaaatctccagccaatcaggagccagcaacgacaaccactactttggctacagcaccccctgggggtattttgacttcaacagattccactgccacttttcaccacgtgactggcaaagactcatcaacaacaactggggattccggcccaaaagactcaacttcaagctctttaatattcaagtcaaagaggtcacgcagaatgacggtacgacgacgattgccaataaccttaccagcacggttcaggtgtttactgactcggagtaccagctcccgtacgtcctgggctcggcgcatcaaggatgcctcccgccgtttccagcggacgtcttcatggtcccacagtatggatacctcaccctgaacaacgggagtcaggcggtaggacgctcttccttttactgcctggagtactttccttctcagatgctgcgtactggaaacaactttcagttcagctacacttttgaagacgtgcctttccacagcagctacgctcacagccagagtctggatcggctgatgaatcctctgatcgaccagtacctgtattatctgaacaagacacaaacaaatagtggaactcttcagcagtctcggctactgtttagccaagctggaccaaccaacatgtctcttcaagctaaaaactggctgcctggaccttgctacagacagcagcgtctgtcaaaacaggcaaacgacaacaacaacagcaactttccctggactgcagctacaaagtatcatctaaatggccgggactcgttggttaatccaggaccagctatggccagtcacaaggatgacgaagaaaagtttttccccatgcatggaaccctgatatttggtaaacaaggaacaaatgccaacgacgcggatttggaaaatgtcatgattacagatgaagaagaaatcagggccaccaatcccgtggctacggagcagtacgggactgtgtcaaataatttgcaaaactcaaacactggtccaactactggaactgtcaatcgccaaggagcgttacctggtatggtgtggcaggatcgagacgtgtacctgcagggacccatttgggccaagattcctcacaccgatggacactttcatccttctccactgatgggaggttttggactcaaacacccgcctcctcagatcatgatcaaaaacactcccgttccagccaatcctcccacaaacttcagttctgccaagtttgcttctttcatcacacagtattccacgggacaggtcagcgtggagatcgagtgggagctgcagaaggagaacagcaaacgctggaatcccgaaattcagtacacttccaactacaacaagtctgttaatgtggactttactgtggacactaatggtgtgtattcagagcctcgccccattggcaccagatacctgactcgtaatctgtaat

SEQ ID NO: 209 - protein, 735 aa, Adeno-associated virus
MAADGYPPDWLEDTLSEGIRQWWKLKPGPPPPKPAERHKDDSRGLVLPGYKYLGPFNGLDKGEPVNEADAAALEHDKAYDRQLDSGDNPYLKYNHADAEFQERLKEDTSFGGNLGRAVFQAKKRVLEPLGLVEEPVKTAPGKKRPVEHSPVEPDSSSGTGKAGQRPARKRLNFGQTGDADSVPDPQPLGQPPAAPSGLGSTTMATGSGAPMADNNEGADGVGNSSGNWHCDSQWLGDRVITTSTRTWALPTYNNHLYKQISSQSGASNDNHYFGYSTPWGYFDFNRFHCHFSPRDWQRLINNNWGFRPKRLNFKLFNIQVKEVTQNDGTTTIANNLTSTVQVFTDSEYQLPYVLGSAHQGCLPPFPADVFMVPQYGYLTLNNGSQAVGRSSFYCLEYFPSQMLRTGNNFQFSYTFEDVPFHSSYAHSQSLDRLMNPLIDQYLYYLNKTQTNSGTLQQSRLLFSQAGPTNMSLQAKNWLPGPCYRQQRLSKQANDNNNSNFPWTAATKYHLNGRDSLVNPGPAMASHKDDEEKFFPMHGTLIFGKQGTNANDADLENVMITDEEEIRATNPVATEQYGTVSNNLQNSNTGPTTGTVNRQGALPGMVWQDRDVYLQGPIWAKIPHTDGHFHPSPLMGGFGLKHPPPQIMIKNTPVPANPPTNFSSAKFASFITQYSTGQVSVEIEWELQKENSKRWNPEIQYTSNYNKSVNVDFTVDTNGVYSEPRPIGTRYLTRNL

SEQ ID NO: 210 - DNA, 2208 bp, Adeno-associated virus
atggctgccgatggttatcttccagattggctcgaggacactctctctgaaggaataagacagtggtggaagctcaaacctggcccaccaccaccaaagcccgcagagcggcataaggacgacagcaggggtcttgtgcttcctgggtacaggtacctcggacccttcaacggactcgacaagggagagccggtcaacgaggcagacgccgcggccctcgagcacgacaaggcctacgaccggcagctcgacagcggagacaacccgtacctcaagtacaaccacgtcgacgcggagtttcaggagcgtcttaaagaagatacgtcttttgggggcaacctcggacgagcagtcttccaggccaaaaagaggattcttgaacctctgggcctggttgaggaacctgttaaggcggctccgggagaaaagaggccggtagagcactctcctgcggagccagactcctcctcgggaaccggaaaagcgggccagcagcctgcaagaaagagattgaattttggtcagactggagacgcagactcagtacctgacccccagcctctcggacagccaccagcagccccctctggtctgggaactaatacgatggcttcaggcagtggcgcaccaatggcagacaataacgagggcgccgacggagtgggtaattcctcgggaaattggcattgcgattccacatggatgggcgacagagtcatcaccaccagcacccgcacctgggccctgcccacctacaacaaccatctgtacaagcaaatctccagccagtctggagccagcaacgacaaccactactttggctacagcaccccctgggggcattttgacttcaacagattccactgccacttctccccacgtgactggcaaagactcatcaacaacaactggggattccggcccaagagactcagcttcaagctctttaacattcaagtcaaagaggtcacgcagaatgacggtacgacgacgattgccaataaccttaccagcacggttcaggtgtttactgactcggagtaccagctcccgtacgtcctcggctcggcgcatcaaggatgcctcccgccgttcccagcagacgtcttcatggtgccacagtatggatacctcaccctgaacaacggcagtcaggcggtaggacgctcttccttttactgcctggagtactttccttctcagatgcttcgtaccggaaacaactttaccttcagctacacctttgaagacgttcctttccatagcagctacgctcacagccaaagtctggaccgtctcatgaatcctctcatcgaccagtacctgtattacttgagcagaacaaacactccaagcggaaccaccacgatgtccaggcttcagttttctcaggccggagcaagtgacattcgggaccagtctagaaactggcttcctggaccctgttaccgccagcagcgagtatcaaagacagctgcggacaacaacaacagtgattactcgtggactggagctaccaagtaccacctcaatggaagagactctctggtgaatccgggcccagctatggccagccacaaggacgatgaagaaaaatattttcctcagagcggggttctcatctttggaaaacaagactcgggaaaaactaatgtggacattgaaaaggttatgattacagacgaagaggaaatcaggaccaccaatcccgtggctacggagcagtatggttctgtatctaccaacctccagagcggcaacacacaagcagctacctcagatgtcaacacacaaggcgttcttccaggcatggtctggcaggacagagacgtgtacctgcaggggcccatctgggcaaagattccacacacggacggacattttcacccctctccccccatgggcggattcggacttaaacaccctcctccacaaattctcatcaagaacaccccggtacctgcgaatccttcgaccactttcagtgcggcaaagtttgcttccttcatcacacagtactccacggggcaggtcagcgtggagatcgagtgggagctgcagaaggagaacagcaaacgctggaatcccgaaattcagtacacttccaactacaacaaatctgttaatgtggactttactgtggacactaatggtgtgtattcagagcctcgccccattggcgccagatacctgactcgtaatctgtaa

SEQ ID NO: 211 - protein, 735 aa, Adeno-associated virus
MAADGYLPDWLEDTLSEGIRQWWKLKPGPPPPKPAERHKDDSRGLVLPGYRYLGPFNGLDKGEPVNEADAAALEHDKAYDRQLDSGDNPYLKYNHVDAEFQERLKEDTSFGGNLGRAVFQAKKRILEPLGLVEEPVKAAPGEKRPVEHSPAEPDSSSGTGKAGQQPARKRLNFGQTGDADSVPDPQPLGQPPAAPSGLGTNTMASGSGAPMADNNEGADGVGNSSGNWHCDSTWMGDRVITTSTRTWALPTYNNHLYKQISSQSGASNDNHYFGYSTPWGHFDFNRFHCHFSPRDWQRLINNNWGFRPKRLSFKLFNIQVKEVTQNDGTTTIANNLTSTVQVFTDSEYQLPYVLGSAHQGCLPPFPADVFMVPQYGYLTLNNGSQAVGRSSFYCLEYFPSQMLRTGNNFTFSYTFEDVPFHSSYAHSQSLDRLMNPLIDQYLYYLSRTNTPSGTTTMSRLQFSQAGASDIRDQSRNWLPGPCYRQQRVSKTAADNNNSDYSWTGATKYHLNGRDSLVNPGPAMASHKDDEEKYFPQSGVLIFGKQDSGKTNVDIEKVMITDEEEIRTTNPVATEQYGSVSTNLQSGNTQAATSDVNTQGVLPGMVWQDRDVYLQGPIWAKIPHTDGHFHPSPPMGGFGLKHPPPQILIKNTPVPANPSTTFSAAKFASFITQYSTGQVSVEIEWELQKENSKRWNPEIQYTSNYNKSVNVDFTVDTNGVYSEPRPIGARYLTRNL

SEQ ID NO: 212 - DNA, 2208 bp, Adeno-associated virus
atggctgccgatggttatcttccagattggctcgaggacaccctctctgaaggaataagacagtggtggaagctcaaacctggcccaccaccaccaaagcccgcagagcggcataaggacgacagcaggggtcttgtgcttcctgggtacaagtacctcggacccttcaacggactcgacaagggagagccggtcaacgaggcagacgccgcggccctcgagcacgacaaggcctacgaccggcagctcgacagcggagataacccgtacctcaagtacaaccacgccgacgcggagtttcaggagcgccttaaagaggatacgtcttttgggggcaacctcggacgagcagtcttccaggccaaaaagaggattcttgaacctctgggcctggttgaggaacctgttaagacggctccgggaaaaaagaggccggtagagcactctcctgcggagccagactcctcctcgggaaccggaaaagcgggccagcagcctgcaagaaagagattgaattttggtcagactggagacgcagactcagtacctgacccccggcctctcggacagccaccagcagccccctctggtctgggaactaatacgatggcttcaggcagtggcgcaccaatggcagacaataacgagggcgccgacggagtgggtaattcctcgggaaattggcattgcgattccacatggatgggcgacagagtcatcaccaccagcacccgcacctgggccctgcccacctacaacaaccatctgtacaagcaaatctccagccagtctggagccagcaacgacaaccactactttggctacagcaccccctgggggtattttgacttcaacagattccactgccacttctccccacgtgactggcaaagactcatcaacaacaactggggattccggcccaagagactcagcttcaagctctttaacattcaagtcaaagaggtcacgcagaatgacggtacgacgacgattgccaataaccttaccagcacggttcaggtgtttactgactcggagtaccagctcccgtacgtcctcggctcggcgcatcaaggatgcctcccgccgttcccagcagacgtcttcatggtgccacagtatggatacctcaccctgaacaacggcagtcaggcggtaggacgctcttccttttactgcctggagtactttccttctcagatgcttcgtaccggaaacaactttaccttcagctacacctttgaagacgttcctttccatagcagctacgctcacagccaaagtctggaccgtctcatgaatcctctcatcgaccagtacctgtattacttgagcagaacaaacactccaagcggaaccaccacgatgtccaggcttcagttttctcaggccggagcaagtgacattcgggaccagtctagaaactggcttcctggaccctgttaccgccagcagcgagtatcaaagacagctgcggacaacaacaacagtgattactcgtggactggagctaccaagtaccacctcaatggaagagactctctggtgaatccgggcccagctatggccagccacaaggacgatgaagaaaaatattttcctcagagcggggttctcatctttggaaaacaagactcgggaaaaactaatgtggacattgaaaaggttatgattacagacgaagaggaaatcaggaccaccaatcccgtggctacggagcagtatggttctgtatctaccaacctccagagcggcaacacacaagcagctacctcagatgtcaacacacaaggcgttcttccaggcatggtctggcaggacagagacgtgtacctgcaggggcccatctgggcaaagattccacacacggacggacattttcacccctctcccctcatgggcggattcggacttaaacaccctcctccacaaattctcatcaagaacaccccggtacctgcgaatccttcgaccactttcagtgcggcaaagtttgcttccttcatcacacagtactccacggggcaggtcagcgtggagatcgagtgggagctgcagaaggagaacagcaaacgctggaatcccgaaattcagtacacttccaactacaacaaatctgttaatgtggactttactgtggacactaatggtgtgtattcagagcctcgccccattggcaccagatacctgactcgtaatctgtaa

SEQ ID NO: 213 - protein, 735 aa, Adeno-associated virus
MAADGYLPDWLEDTLSEGIRQWWKLKPGPPPPKPAERHKDDSRGLVLPGYKYLGPFNGLDKGEPVNEADAAALEHDKAYDRQLDSGDNPYLKYNHADAEFQERLKEDTSFGGNLGRAVFQAKKRILEPLGLVEEPVKTAPGKKRPVEHSPAEPDSSSGTGKAGQQPARKRLNFGQTGDADSVPDPRPLGQPPAAPSGLGTNTMASGSGAPMADNNEGADGVGNSSGNWHCDSTWMGDRVITTSTRTWALPTYNNHLYKQISSQSGASNDNHYFGYSTPWGYFDFNRFHCHFSPRDWQRLINNNWGFRPKRLSFKLFNIQVKEVTQNDGTTTIANNLTSTVQVFTDSEYQLPYVLGSAHQGCLPPFPADVFMVPQYGYLTLNNGSQAVGRSSFYCLEYFPSQMLRTGNNFTFSYTFEDVPFHSSYAHSQSLDRLMNPLIDQYLYYLSRTNTPSGTTTMSRLQFSQAGASDIRDQSRNWLPGPCYRQQRVSKTAADNNNSDYSWTGATKYHLNGRDSLVNPGPAMASHKDDEEKYFPQSGVLIFGKQDSGKTNVDIEKVMITDEEEIRTTNPVATEQYGSVSTNLQSGNTQAATSDVNTQGVLPGMVWQDRDVYLQGPIWAKIPHTDGHFHPSPLMGGFGLKHPPPQILIKNTPVPANPSTTFSAAKFASFITQYSTGQVSVEIEWELQKENSKRWNPEIQYTSNYNKSVNVDFTVDTNGVYSEPRPIGTRYLTRNL

SEQ ID NO: 214 - DNA, 2208 bp, Adeno-associated virus
atggctgccgatggttatcttccagattggctcgaggacactctctctgaaggaataagacagtggtggaagctcaaacctggcccaccaccaccaaagcccgcagagcggcataaggacgacagcaggggtcttgtgcttcctgggtacaagtacctcggacccttcaacggactcgacaagggagagccggtcaacgaggcagacgccgcggccctcgagcacgacaaggcctacgaccggcagctcgacagcggagacaacccgtacctcaagtacaaccacgccgacgcggagtttcaggagcgccttaaaggagatacgtcttttgggggcaacctcggacgagcagtcttccaggccaaaaagaggattcttgaacctctgggcctggttgaggaacctgttaagacggctccgggaaaaaagaggccggtagagcactctcctgcggagccagactcctcctcgggaaccggaaaagcgggccagcagcctgcaagaaagagattgaattttggtcagactggagacgcagactcagtacctgacccccagcctctcggacagccaccagcagccccctctggtctgggaactaatacgatggcttcaggcagtggcgcaccaatggcagacaataacgagggcgccgacggagtgggtaattcctcgggaaattggcattgcgattccacatggatgggcggcagagtcatcaccaccagcacccgcacctgggccctgcccacctacaacaaccatctgtacaagcaaatctccagccagtctggagccagcaacgacaaccactactttggctacagcaccccctgggggtattttgacttcaacagattccactgccacttctccccacgtgactggcaaagactcatcaacaacaactggggattccggcccaagagactcagcttcaagctctttaacattcaagtcaaagaggtcacgcagaatgacggtacgacgacgattgccaataaccttaccagcacggttcaggtgtttactgactcggagtaccagctcccgtacgtcctcggctcggcgcatcaaggatgcctcccgccgttcccagcagacgtcttcatggtgccacagtatggatacctcaccctgaacaacggcagtcaggcggtaggacgctcttccttttactgcctggagtactttccttctcagacgcttcgtaccggaaacaactttaccttcagctacacctttgaagacgttcctttccatagcagctacgctcacagccaaagtctggaccgtctcatgaatcctctcatcgaccagtacctgtattacttgagcagaacaaacactccaagcggaaccaccacgatgtccaggcttcagttttctcaggccggagcaagtgacattcgggaccagtctagaaactggcttcctggaccctgttaccgccagcagcgagtatcaaagacagctgcggacaacaacaacagtgattactcgtggactggagctaccaagtaccacctcaatggaagagactctctggtgaatccgggcccagctatggccagccacaaggacgatgaagaaaaatattttcctcagagcggggttctcatctttggaaaacaagactcgggaaaaactaatgtggacattgaaaaggttatgattacagacgaagaggaaatcaggaccaccaatcccgtggctacggagcagtatggttctgtatctaccaacctccagagcggcaacacacaagcagctacctcagatgtcaacacacaaggcgttcttccaggcatggtctggcaggacagagacgtgtacctgcaggggcccatctgggcaaagattccacacacggacggacattttcacccctctcccctcatgggcggattcggacttaaacaccctcctccacaaattctcatcaagaacaccccggtacctgcgaatccttcgaccactttcagtgcggcaaagtttgcttccttcatcacacagtactccacggggcaggtcagcgtggagatcgagtgggagctgcagaaggagaacagcaaacgctggaatcccgaaattcagtacacttccaactacaacaaatctgttaatgtggactttactgtggacactaatggtgtgtattcagagcctcgccccattggcaccagatacctgactcgtaatctgtaa

SEQ ID NO: 215 - protein, 735 aa, Adeno-associated virus
MAADGYLPDWLEDTLSEGIRQWWKLKPGPPPPKPAERHKDDSRGLVLPGYKYLGPFNGLDKGEPVNEADAAALEHDKAYDRQLDSGDNPYLKYNHADAEFQERLKGDTSFGGNLGRAVFQAKKRILEPLGLVEEPVKTAPGKKRPVEHSPAEPDSSSGTGKAGQQPARKRLNFGQTGDADSVPDPQPLGQPPAAPSGLGTNTMASGSGAPMADNNEGADGVGNSSGNWHCDSTWMGGRVITTSTRTWALPTYNNHLYKQISSQSGASNDNHYFGYSTPWGYFDFNRFHCHFSPRDWQRLINNNWGFRPKRLSFKLFNIQVKEVTQNDGTTTIANNLTSTVQVFTDSEYQLPYVLGSAHQGCLPPFPADVFMVPQYGYLTLNNGSQAVGRSSFYCLEYFPSQTLRTGNNFTFSYTFEDVPFHSSYAHSQSLDRLMNPLIDQYLYYLSRTNTPSGTTTMSRLQFSQAGASDIRDQSRNWLPGPCYRQQRVSKTAADNNNSDYSWTGATKYHLNGRDSLVNPGPAMASHKDDEEKYFPQSGVLIFGKQDSGKTNVDIEKVMITDEEEIRTTNPVATEQYGSVSTNLQSGNTQAATSDVNTQGVLPGMVWQDRDVYLQGPIWAKIPHTDGHFHPSPLMGGFGLKHPPPQILIKNTPVPANPSTTFSAAKFASFITQYSTGQVSVEIEWELQKENSKRWNPEIQYTSNYNKSVNVDFTVDTNGVYSEPRPIGTRYLTRNL

SEQ ID NO: 216 - DNA, 2208 bp, Adeno-associated virus
atggctgccgatggttatcttccagattggctcgaggacactctctctgaaggaataagacagtggtggaagctcaaacctggcccaccaccaccaaagcccgcagagcggcataaggacgacagcaggggtcttgtgcttcctgggtacaagtacctcggacccttcaacggactcgacaagggagagccggtcaacgaggcagacgccgcggccctcgagcacgacaaggcctacgaccggcagctcgacagcggagacaacccgtacctcaagtacaaccacgccgacgcggagtttcaggagcgtcttaaagaagatacgtcttttgggggcaacctcggacgagcagtcttccaggccaaaaagaggattcttgaacctctgggcctggttgaggaacctgttaagacggctccgggaaaaaagaggccggtagagcactctcctgcggagccagactcctcctcgggaaccggaaaagcgggccagcagcctgcaagaaagagattgaattttggtcagactggagacgcagactcagtacctgacccccagcctctcggacagccaccagcagccccctctggtctgggaactaatacgatggcttcaggcagtggcgcaccaatggcagacaataacgagggcgccgacggagtgggtaattcctcgggaaattggcattgcgattccacatggatgggcgacagagtcatcaccaccagcacccgcacctgggccctgcccacctgcaacaaccatctgtacaagcaaatctccagccagtctggagccagcaacgacaaccactactttggctacagcaccccctgggggtattttgacttcaacagattccactgccacttctccccacgtgactggcaaagactcatcaacaacaactggggattccggcccaagagactcagcttcaagctctttaacattcaagtcaaagaggtcacgcagaatgacggtacgacgacgattgccaataaccttaccagcacggttcaggtgtttactgactcggagtaccagctcccgtacgtcctcggctcggcgcatcaaggatgcctcccgccgttcccagcagacgtcttcatggtgccacagtatggatacctcaccctgaacaacggcagtcaggcggtaggacgctcttccttttactgcctggagtattttccttctcagatgcttcgtaccggaaacaactttaccttcagctacacctttgaagacgttcctttccatagcagctacgctcacagccaaagtctggaccgtctcatgaatcctctcatcgaccagtacctgtattacttgagcagaacaaacactccaagcggaaccaccacgatgtccaggcttcagttttctcaggccggagcaagtgacattcgggaccagtctagaaactggcttcctggaccctgttaccgccagcagcgagtatcaaagacagctgcggacaacaacaacagtgattactcgtggactggagctaccaagtaccacctcaatggaagagactctctggtgaatccgggcccagctatggccagccacaaggacgatgaagaaaaatattttcctcagagcggggttctcatctttggaaaacaagactcgggaaaaactaatgtggacattgaaaaggttatgattacagacgaagaggaaatcaggaccaccaatcccgtggctacggagcagtatggttctgtatctacctacctccagagcggcaacacacaagcagctacctcagatgtcaacacacaaggcgttcttccaggcatggtctggcaggacagagacgtgtacctgcgggggcccatctgggcaaagattccacacacggacggacattttcacccctctcccctcatgggcggatttggacttaaacaccctcctccacaaattctcatcaagaacaccccggtacctgcgaatccttcgaccactttcagtgcggcaaagtttgcttccttcatcacacagtactccacggggcaggtcagcgtggagatcgagtgggagctgcagaaggagaacagcaaacgctggaatcccgaaattcagtacacttccaactacaacaaatctgttaatgtggactttactgtggacactaatggtgtgtattcagagcctcgccccattggcaccagatacctgactcgtaatctgtaa

SEQ ID NO: 217 - protein, 735 aa, Adeno-associated virus
MAADGYLPDWLEDTLSEGIRQWWKLKPGPPPPKPAERHKDDSRGLVLPGYKYLGPFNGLDKGEPVNEADAAALEHDKAYDRQLDSGDNPYLKYNHADAEFQERLKEDTSFGGNLGRAVFQAKKRILEPLGLVEEPVKTAPGKKRPVEHSPAEPDSSSGTGKAGQQPARKRLNFGQTGDADSVPDPQPLGQPPAAPSGLGTNTMASGSGAPMADNNEGADGVGNSSGNWHCDSTWMGDRVITTSTRTWALPTCNNHLYKQISSQSGASNDNHYFGYSTPWGYFDFNRFHCHFSPRDWQRLINNNWGFRPKRLSFKLFNIQVKEVTQNDGTTTIANNLTSTVQVFTDSEYQLPYVLGSAHQGCLPPFPADVFMVPQYGYLTLNNGSQAVGRSSFYCLEYFPSQMLRTGNNFTFSYTFEDVPFHSSYAHSQSLDRLMNPLIDQYLYYLSRTNTPSGTTTMSRLQFSQAGASDIRDQSRNWLPGPCYRQQRVSKTAADNNNSDYSWTGATKYHLNGRDSLVNPGPAMASHKDDEEKYFPQSGVLIFGKQDSGKTNVDIEKVMITDEEEIRTTNPVATEQYGSVSTYLQSGNTQAATSDVNTQGVLPGMVWQDRDVYLRGPIWAKIPHTDGHFHPSPLMGGFGLKHPPPQILIKNTPVPANPSTTFSAAKFASFITQYSTGQVSVEIEWELQKENSKRWNPEIQYTSNYNKSVNVDFTVDTNGVYSEPRPIGTRYLTRNL

SEQ ID NO: 218 - DNA, 2208 bp, Adeno-associated virus; identical to SEQ ID NO: 212

SEQ ID NO: 219 - protein, 735 aa, Adeno-associated virus; identical to SEQ ID NO: 213

SEQ ID NO: 220 - DNA, 2208 bp, Adeno-associated virus
atggctgccgatggttatcttccagattggctcgaggacactctctctgaaggaataagacagtggtggaagctcaaacctggcccaccaccaccaaagcccgcagagcggcataaggacggcagcaggggtcttgtgcttcctgggtacaagtacctcggacccttcaacggactcgacaagggagagccggtcaacgaggcagacgccgcggccctcgagcacgacaaggcctacgaccggcagctcaacagcggagacaacccgtacctcaagtacaaccacgccgacgcggagtttcaggagcgccttaaagaagatacgtcttttgggggcaacctcggacgagcagtcttccaggcaaaaaagagggttcttgaacctctgggcctggttgaggagcctgttaaaacggctccgggaaaaaagagaccggtagagcactctcctgcggagccagactcctcctcgggaaccggaaaagcgggccagcagcctgcaagaaagagattgaattttggtcagactggagacgcagactccgtacctgacccccagcctctcggacagccaccagcagccccctctggtctgggatctactacaatggctacaggcagtggcgcaccaatggcagacaataacgagggtgccgatggagtgggtaattcctcaggaaattggcattgcgattcccaatggctgggcgacagagtcatcaccacaagcactcgaacctgggccctgcccacctacaacaaccacctctacaagcaaatctccagccaatcaggagcctcaaacgacaaccactattttggctacagcaccccttgggggtattttgacttcaacagattccactgccacttttcaccacgtgactggcaaagactcatcaacaacaactggggattccgacccaagagactcaacttcaagctctttaacattcaagtcaaagaggtcacgcagaatgacggtacgacgacgattgccaataaccttaccagcacggttcaggtgtttactgactcggagtaccagctcccgtacgtcctcggctcggcgcatcaaggatgcctcccgccgttcccagcggacgtcttcatggtcccacagtatggatacctcaccctgaacaacgggagtcaggcggtaggacgctctcccttttactgcctggagtactttccttctcagatgctgcgtactggaaacaactttcagttcagctacacttttgaagacgtgcctttccacagcagctacgctcacagccagagtctggatcggctgatgaatcctctgatcgaccagtacctgtattatctgaacaagacacaaacaaatagtggaactcttcagcagtctcggctactgtttagccaagctggacccaccaacatgtctcttcaagctaaaaactggctgcctggaccttgctacagacagcagcgtctgtcaaagcaggcaaacgacaacaacaacagcaactttccctggactgcagctacaaagtatcatctaaatggccgggactcgttggttaatccaggaccagctatggccagtcacaaggatgacgaagaaaagtttttccccatgcatggaaccctgatatttggtaaacaaggaacaaatgccaacgacgcggatttggaaaatgtcatgattacagatgaagaagaaatcaggaccaccaatcccgtggctacggagcagtacgggactgtgtcaaataatttgcaaaactcaaacactggtccaactactggaactgtcaatcaccaaggagcgttacctggtatggtgtggcaggatcgagatgtgtaccttcagggacccatttgggccaagattcctcacaccgatggacactttcatccttctccactgatgggaggttttggactcaaacacccgcctcctcagattatgatcaaaaacactcccgttccagccaatcctcctacaaacttcagttctgccaagtttgcttctttcatcacacagtattccacggggcaggtcagcgtggagatcgagtgggagctgcagaaggagaacagcaaacgctggaatcccgaaattcagtacacttccaactacaacaaatctgttaatgtggactttactgtggacaataatggcgtgtactcagagcctcgccccattggcaccagatacctgactcgtaatctgtaa

SEQ ID NO: 221 - protein, 735 aa, Adeno-associated virus
MAADGYLPDWLEDTLSEGIRQWWKLKPGPPPPKPAERHKDGSRGLVLPGYKYLGPFNGLDKGEPVNEADAAALEHDKAYDRQLNSGDNPYLKYNHADAEFQERLKEDTSFGGNLGRAVFQAKKRVLEPLGLVEEPVKTAPGKKRPVEHSPAEPDSSSGTGKAGQQPARKRLNFGQTGDADSVPDPQPLGQPPAAPSGLGSTTMATGSGAPMADNNEGADGVGNSSGNWHCDSQWLGDRVITTSTRTWALPTYNNHLYKQISSQSGASNDNHYFGYSTPWGYFDFNRFHCHFSPRDWQRLINNNWGFRPKRLNFKLFNIQVKEVTQNDGTTTIANNLTSTVQVFTDSEYQLPYVLGSAHQGCLPPFPADVFMVPQYGYLTLNNGSQAVGRSPFYCLEYFPSQMLRTGNNFQFSYTFEDVPFHSSYAHSQSLDRLMNPLIDQYLYYLNKTQTNSGTLQQSRLLFSQAGPTNMSLQAKNWLPGPCYRQQRLSKQANDNNNSNFPWTAATKYHLNGRDSLVNPGPAMASHKDDEEKFFPMHGTLIFGKQGTNANDADLENVMITDEEEIRTTNPVATEQYGTVSNNLQNSNTGPTTGTVNHQGALPGMVWQDRDVYLQGPIWAKIPHTDGHFHPSPLMGGFGLKHPPPQIMIKNTPVPANPPTNFSSAKFASFITQYSTGQVSVEIEWELQKENSKRWNPEIQYTSNYNKSVNVDFTVDNNGVYSEPRPIGTRYLTRNL

SEQ ID NO: 222 - DNA, 2208 bp, Adeno-associated virus
atggctgccgatggttatcttccagattggctcgaggacactctctctgaaggaataagacagtggtggaagctcaaacctggcccaccaccaccaaagcccgcagagcggcataaggacgacagcaggggtcttgtgcttcctgggtacaagtacctcggacccttcaacggactcgacaagggagagccggtcaacgaggcagacgccgcggccctcgagcacgacaaggcctacgaccggcagctcgacagcggagacaacccgtacctcaagtacaaccacgccgacgcggagtttcaggagcgtcttaaagaagatacgtcttttgggggcaacctcggacgagcagtcttccaggccaaaaagaggattcttgaacctctgggcctggttgaggaacctgttaagacggctccgggaaaaaagaggccggtagagcactctcctgcggagccagactcctcctcgggaaccggaaaagcgggccagcagcctgcaagaaagagattgaattttggtcagactggagacgcagactcagtacctgacccccagcctctcggacagccaccagcagccccctctggtctgggaactaatacgatggcttcaggcagtggcgcaccaatggcagacaataacgagggcgccgacggagtgggtaattcctcgggaaattggcattgcgattccacatggatgggcgacagagtcatcaccaccagcacccgcacctgggccctgcccacctacaacaaccatctgtacaagcaaatctccagccagtctggagccagcaacgacaaccactactttggctacagcaccccctgggggtattttgacttcaacagattccactgccacttctccccacgtgactggcaaagactcatcaacaacaactggggattccggcccaagagactcagcttcaagctctttaacattcaagtcaaagaggtcacgcagaatgacggtacgacgacgattgccaataaccttaccagcacggttcaggtgtttactgactcggagtaccagctcccgtacgtcctcggctcggcgcatcaaggatgcctcccgccgttcccagcagacgtcttcatggtgccacagtatggatacctcaccctgaacaacggcagtcaggcggtaggacgctcttccttttactgcctggagtactttccttctcagatgcttcgtaccggaaacaactttaccttcagctacacctttgaagacgttcctttccatagcagctacgctcacagccaaagtctggaccgtctcatgaatcctctcatcgaccagtacctgtattacttgagcagaacaaacactccaagcggaaccaccacgatgtccaggcttcagttttctcaggccggagcaagtgacattcgggaccagtctagaaactggcttcctggaccctgttaccgccagcagcgagtatcaaagacagctgcggacaacaacaacagtgattactcgtggactggagctaccaagtaccacctcaatggaagagactctctggtgaatccgggcccagctatggccagccacaaggacgatgaagaaaaatattttcctcagagcggggttctcatctttggaaaacaagactcgggaaaaactaatgtggacattgaaaaggttatgattacagacgaagaggaaatcaggaccaccaatcccgtggctacggagcagtatggttctgtatctaccaacctccagagcggcaacacacaagcagctacctcagatgtcaacacacaaggcgttcttccaggcatggtctggcaggacagagacgtgtacctgcaggggcccatctgggcaaagattccacacacggacggacattttcacccctctcccctcatgggcggattcggacttaaacaccctcctccacaaattctcatcaagaacaccccggtacctgcgaatccttcgaccactttcagtgcggcaaagtttgcttccttcatcacacagtactccacggggcaggtcagcgtggagatcgagtgggagctgcagaaggagaacagcaaacgctggaatcccgaaattcagtacacttccaactacaacaaatctgttaatgtggactttactgtggacactaatggtgtgtattcagagcctcgccccattggcaccagatacctgactcgtaatctgtaa

SEQ ID NO: 223 - protein, 735 aa, Adeno-associated virus
MAADGYLPDWLEDTLSEGIRQWWKLKPGPPPPKPAERHKDDSRGLVLPGYKYLGPFNGLDKGEPVNEADAAALEHDKAYDRQLDSGDNPYLKYNHADAEFQERLKEDTSFGGNLGRAVFQAKKRILEPLGLVEEPVKTAPGKKRPVEHSPAEPDSSSGTGKAGQQPARKRLNFGQTGDADSVPDPQPLGQPPAAPSGLGTNTMASGSGAPMADNNEGADGVGNSSGNWHCDSTWMGDRVITTSTRTWALPTYNNHLYKQISSQSGASNDNHYFGYSTPWGYFDFNRFHCHFSPRDWQRLINNNWGFRPKRLSFKLFNIQVKEVTQNDGTTTIANNLTSTVQVFTDSEYQLPYVLGSAHQGCLPPFPADVFMVPQYGYLTLNNGSQAVGRSSFYCLEYFPSQMLRTGNNFTFSYTFEDVPFHSSYAHSQSLDRLMNPLIDQYLYYLSRTNTPSGTTTMSRLQFSQAGASDIRDQSRNWLPGPCYRQQRVSKTAADNNNSDYSWTGATKYHLNGRDSLVNPGPAMASHKDDEEKYFPQSGVLIFGKQDSGKTNVDIEKVMITDEEEIRTTNPVATEQYGSVSTNLQSGNTQAATSDVNTQGVLPGMVWQDRDVYLQGPIWAKIPHTDGHFHPSPLMGGFGLKHPPPQILIKNTPVPANPSTTFSAAKFASFITQYSTGQVSVEIEWELQKENSKRWNPEIQYTSNYNKSVNVDFTVDTNGVYSEPRPIGTRYLTRNL

SEQ ID NO: 224 - DNA, 2208 bp, Adeno-associated virus
atggctgccgatggttatcttccagattggctcgaggacactctctctgaaggaataagacagtggtggaagctcaaacctggcccaccaccaccaaagcccgcagagcggcataaggacgacagcaggggtcttgtgcttcctgggtacaagtacctcggacccttcaacggactcgacaagggagagccggtcaacgaggcagacgccgcggccctcgagcacgacaaggcctacgaccggcagctcgacagcggagacaacccgtacctcaagtacaaccacgccgacgcggagtttcaggagcgtcttaaagaagatacgtcttttgggggcaacctcggacgagcagtcttccaggccaaaaagaggattcttgaacctctgggcctggttgaggaacctgttaagacggctccgggaaaaaagaggccggtagagcactctcctgcggagccagactcctcctcgggaaccggaaaagcgggccagcagcctgcaagaaagagattgaattttggtcagactggagacgcagactcagtacctgacccccagcctctcggacagccaccagcagccccctctggtctgggaactaatacgatggcttcaggcagtggcgcaccaatggcagacaataacgagggcgccgacggagtgggtaattcctcgggaaattggcattgcgattccacatggatgggcgacagagtcatcaccaccagcacccgcacctgggccctgcccacctacaacaaccatctgtacaagcaaatctccagccagtctggagccagcaacgacaaccactactttggctacagcaccccctgggggtatttcgacttcaacagattccactgccacttctccccacgtgactggcaaagactcatcaacaacaactggggattccggcccaagagactcagcttcaagctctttaacattcaagtcaaagaggtcacgcagaatgacggtacgacgacgattgccaataaccttaccagcacggttcaggtgtttactgactcggggtaccagctcccgtacgtcctcggctcggcgcatcaaggatgccttccgccgttcccagcagacgtcttcatggtgccacagtatggatacctcaccctgaacaacggcagtcaggcggtaggacgctcttccttttactgcctggagtactttccttctcagatgcttcgtaccggaaacaactttaccttcagctacacctttgaagacgttcctttccatagcagctacgctcacggccaaagtctggaccgtctcatgaatcctctcatcgaccagtacctgtattacttgagcagaacaaacactccaagcggaaccaccacgatgtccaggcttcagttttctcaggccggagcaagtgacgttcgggaccagtctagaaactggcttcctggaccctgttaccgccagcagcgagtatcaaagacagctgcggacaacaacaacagtgattactcgtggactggagctaccaagtaccacctcaatggaagagactctctggtgaatccgggcccagctatggccagccacaaggacgatgaagaaaaatattttcctcagagcggggttctcgtctttggaaaacaagactcgggaaaaactaatgtggacattgaaaaggttatgattacagacgaagaggaaatcaggaccaccaatcccgcggctacggagcagtatggttctgtatctaccaacctccagagcggcaacacacaagcagctacctcagatgtcaacacacaaggcgttcttccaggcatggtctggcaggacagagacgtgtacctgcaggggcccatctgggcaaagattccacacacggacggacattttcacccctctcccctcatgggcggattcggacttaaacaccctcctccacaaattctcatcaagaacaccccggtacctgcgaatccttcgaccactttcagtgcggcaaagtttgtttccttcatcacacagtactccacggggcaggtcagcgtggagatcgagtgggagctgcagaaggagaacagcaaacgctggaatcccgaaattcagtacacttccaactacaacaaatctgttaatgtggactttactgtggacactaatggtgtgtattcagagcctcgccccattggcaccagatacctgactcgtaatctgtaa

SEQ ID NO: 225 - protein, 735 aa, Adeno-associated virus
MAADGYLPDWLEDTLSEGIRQWWKLKPGPPPPKPAERHKDDSRGLVLPGYKYLGPFNGLDKGEPVNEADAAALEHDKAYDRQLDSGDNPYLKYNHADAEFQERLKEDTSFGGNLGRAVFQAKKRILEPLGLVEEPVKTAPGKKRPVEHSPAEPDSSSGTGKAGQQPARKRLNFGQTGDADSVPDPQPLGQPPAAPSGLGTNTMASGSGAPMADNNEGADGVGNSSGNWHCDSTWMGDRVITTSTRTWALPTYNNHLYKQISSQSGASNDNHYFGYSTPWGYFDFNRFHCHFSPRDWQRLINNNWGFRPKRLSFKLFNIQVKEVTQNDGTTTIANNLTSTVQVFTDSGYQLPYVLGSAHQGCLPPFPADVFMVPQYGYLTLNNGSQAVGRSSFYCLEYFPSQMLRTGNNFTFSYTFEDVPFHSSYAHGQSLDRLMNPLIDQYLYYLSRTNTPSGTTTMSRLQFSQAGASDVRDQSRNWLPGPCYRQQRVSKTAADNNNSDYSWTGATKYHLNGRDSLVNPGPAMASHKDDEEKYFPQSGVLVFGKQDSGKTNVDIEKVMITDEEEIRTTNPAATEQYGSVSTNLQSGNTQAATSDVNTQGVLPGMVWQDRDVYLQGPIWAKIPHTDGHFHPSPLMGGFGLKHPPPQILIKNTPVPANPSTTFSAAKFVSFITQYSTGQVSVEIEWELQKENSKRWNPEIQYTSNYNKSVNVDFTVDTNGVYSEPRPIGTRYLTRNL

SEQ ID NO: 226 - DNA, 2208 bp, Adeno-associated virus
atggctgccgatggttatcttccagattggctcgaggacactctctctgaaggaataagacagtggtggaaactcaaacctggcccaccaccaccaaagcccgcagagcggcataaggacgacagcaggggtcttgtgcttcctgggtacaagtacctcggacccttcaacggactcgacaagggagagccggtcaacgaggcagacgccgcggccctcgagcacgacaaggcctacgaccggcagctcgacagcggagacaacccgtacctcaagtacaaccacgccgacgcggagtttcaggagcgccttaaagaagatacgtcttttgggggcaacctcggacgagcagtcttccaggcaaaaaagagggttctggaacctctgagcctggttgaggagcctgttaagacggctccgggaaaaaagaggccggtagagcactctcccgcagagccagattcctcctccggaactggaaagtcgggcaaccagcctgcaagaaagagattgaatttcggtcagactggagactcagactccgtacctgacccccagcctctcggacagccaccagcagccccctctggtctgggaactaatacgatggctacaggcagtggcgcaccaatggcagacaataacgagggcgccgacggagtgggtaattcctcgggaaattggcattgcgattccacatggatgggcgacagagtcatcaccaccagcacccgaacctgggccctgcccacctacaacaaccatctgtacaagcaaatatccagccagtctggagccagcaacgacaatcactactttggctacagcaccccctgggggtattttgacttcaacagattccactgccacttttcaccacgtgactggcaaagactcatcaacaacaactggggattccgacccaagagactcaacttcaagctctttaacattcaagtcaaagaggtcacgcagaatgacggtacgacgacgattgccaataaccttaccagcacggttcaggtgtttactgactcggagtaccagctcccgtacgtcctcggctcggcgcatcaaggatgcctcccgccgttcccagcagacgtcttcatggtgccacagtatggatacctcaccctgaacaacgggagtcaggcagtaggacgctcttcattttactgcctagagtactttccttctcagatgctgcgtaccggaaacaactttaccttcagctacacctttgaggacgttcctttccacagcagctacgctcacagccagagtttggaccgtctcatgaatcctctcatcgaccagtacctgtattacttgagcagaacaaacactccaagcggaaccaccacgcagtccaggcttcagttttctcaggccggagcgagtgacattcaggaccagtctaggaactggcttcctggaccctgttaccgtcagcagcgagtatcaaagacatctgcggataacaacaacagtgaatactcgtggactggagctaccaagtaccacctcaatggcagagactctctggtgaatccgggcccggccatggccagccacaaagacgatgaagaaaagttttttcctcagagcggggttcttatctttgggaagcaaggctcagagaaaacaaatgtggatattgaaaaggtcatgattacagacgaagaggaaatcaggaccaccaatcccgtggctacggagcagtatggttctgtatctaccaacctccagagcggcaacacacaagcagctaccgcagatgtcaacacacaaggcgttcttccaggcatggtcgggcaagacagagacgtgtacctgcaggggcctacttgggcaaagattccacacacggacggacattttcacccctctcccctcatgggcggatttggacttaaacaccctcctccacagattctcatcaagaacaccccggtacctgcgaatccttcgaccaccttcagtgcggcaaagtttgcttccttcattacacagtactccacggggcaggtcagcgtggagatcgagtgggagctgcagaaggagaacagcaaacgctggaatcccgagatccagtacacttccaactacaacaagtctgttaatgtggactttactgtggacactaatggcgtgtattcagagcctcgccccattggcaccagatacctgactcgtaatctgtaa

SEQ ID NO: 227 - protein, 735 aa, Adeno-associated virus
MAADGYLPDWLEDTLSEGIRQWWKLKPGPPPPKPAERHKDDSRGLVLPGYKYLGPFNGLDKGEPVNEADAAALEHDKAYDRQLDSGDNPYLKYNHADAEFQERLKEDTSFGGNLGRAVFQAKKRVLEPLSLVEEPVKTAPGKKRPVEHSPAEPDSSSGTGKSGNQPARKRLNFGQTGDSDSVPDPQPLGQPPAAPSGLGTNTMATGSGAPMADNNEGADGVGNSSGNWHCDSTWMGDRVITTSTRTWALPTYNNHLYKQISSQSGASNDNHYFGYSTPWGYFDFNRFHCHFSPRDWQRLINNNWGFRPKRLNFKLFNIQVKEVTQNDGTTTIANNLTSTVQVFTDSEYQLPYVLGSAHQGCLPPFPADVFMVPQYGYLTLNNGSQAVGRSSFYCLEYFPSQMLRTGNNFTFSYTFEDVPFHSSYAHSQSLDRLMNPLIDQYLYYLSRTNTPSGTTTQSRLQFSQAGASDIQDQSRNWLPGPCYRQQRVSKTSADNNNSEYSWTGATKYHLNGRDSLVNPGPAMASHKDDEEKFFPQSGVLIFGKQGSEKTNVDIEKVMITDEEEIRTTNPVATEQYGSVSTNLQSGNTQAATADVNTQGVLPGMVGQDRDVYLQGPTWAKIPHTDGHFHPSPLMGGFGLKHPPPQILIKNTPVPANPSTTFSAAKFASFITQYSTGQVSVEIEWELQKENSKRWNPEIQYTSNYNKSVNVDFTVDTNGVYSEPRPIGTRYLTRNL

SEQ ID NO: 228 - DNA, 2208 bp, Adeno-associated virus
atggctgccgatggttatcttccagattggctcgaggacactctctctgaaggaataagacagtggtggaagctcaaacctggcccaccaccaccaaagcccgcagagcggcataaggacgacagcaggggtcttgtgcttcctgggtacaagtacctcggacccttcaacggactcgacaagggagagccggtcaacgaggcagacgccgcggccctcgagcacgacaaggcctacgaccggcagctcgacagcggagacaacccgtacctcaagtacaaccacgccgacgcagagtttcaggagcgccttaaagaagatacgtcttttgggggcaacctcggacgagcagtcttccaggcaaaaaagagggttctggaacctctgggcctggttgaggagcctgttaagacggctccgggaaaaaagaggccggtagagcactctcctgcagagccagattcctcctccggaactggaaagtcgggcaaccagcctgcaagaaagagattgaatttcggtcagactggagactcagactccgtacctgacccccagcctctcggacagccaccagcagccccctctggtctgggaactaatacgatggctacaggcagtggcgcaccaatggcagacaataacgagggcgccgacggagtgggtaattcctcgggaaattggcattgcgattccacatggatgggcgacagagtcatcaccaccagcacccgaacctgggccctgcccacctacaacaaccatctgtacaagcaaatatccagccagtctggagccagcaacgacaatcactactttggctacagcaccccctgggggtattttgacttcaacagattccactgccacttttcaccacgtgactggcaaagactcatcaacaacaactggggattccgacccaagagactcaacttcaagctctttaacattcaagtcaaagaggtcacgcagaatgacggtacgacgacgattgccaataaccttaccagcacggttcaggtgtttactgactcggagtaccagctcccgtacgtcctcggctcggcgcatcaaggatgcctcccgccgttcccagcagacgtcttcatggtgccacagtatggatacctcaccctgaacaacgggagtcaggcagtaggacgctcttcattttactgcctagggtactttccttctcagatgctgcgtaccggaaacaactttaccttcagctacacctttgaggacgttcctttccacagcagctacgctcacagccagagtttggaccgtctcatgaatcctctcatcgaccagtacctgtattacttgagcagaacaaacactccaagcggaaccaccacgcagtccaggcttcagttttctcaggccggagcgagtgacattcgggaccagtctaggaactggcttcctggaccctgttaccgtcagcagcgagtatcaaagacatctgcggataacaacaacagtgaatactcgtggactggagctaccaagtaccacctcaatggcagagactctctggtgaatccgggcccggccatggccagccacaaagacgatgaagaaaagttttttcctcagagcggggttcttatctttgggaagcaaggcccagagaaaacaaatgtggatattgaaaaggtcatgattacagacgaagaggaaatcaggaccaccaatcccgtggctacggagcagtatggttctgtatctaccaacctccagagcggcaacacacaagcagctaccgcagatgtcaacacacaaggcgttcttccaggcatggtctggcaagacagagacgtgtacctgcaggggcctatttgggcaaagattccacacacggacggacattttcacccctctcccctcatgggcggatttggacttaaacaccctcctccacagattctcatcaagaacaccccggtacctgcgaatccttcgaccaccttcagtgcggcaaagtttgcttccttcattacacagtactccacggggcaggtcagcgtggagatcgagtgggagctgcagaaggagaacagcaaacgctggaatcccgagatccagtacacttccaactacaacaagtctgttaatgtggactttactgtggacactaatggcgtgtattcagagcctcgccccattggcaccagatacctgactcgtaatctgtaa

SEQ ID NO: 229 - protein, 735 aa, Adeno-associated virus
MAADGYLPDWLEDTLSEGIRQWWKLKPGPPPPKPAERHKDDSRGLVLPGYKYLGPFNGLDKGEPVNEADAAALEHDKAYDRQLDSGDNPYLKYNHADAEFQERLKEDTSFGGNLGRAVFQAKKRVLEPLGLVEEPVKTAPGKKRPVEHSPAEPDSSSGTGKSGNQPARKRLNFGQTGDSDSVPDPQPLGQPPAAPSGLGTNTMATGSGAPMADNNEGADGVGNSSGNWHCDSTWMGDRVITTSTRTWALPTYNNHLYKQISSQSGASNDNHYFGYSTPWGYFDFNRFHCHFSPRDWQRLINNNWGFRPKRLNFKLFNIQVKEVTQNDGTTTIANNLTSTVQVFTDSEYQLPYVLGSAHQGCLPPFPADVFMVPQYGYLTLNNGSQAVGRSSFYCLGYFPSQMLRTGNNFTFSYTFEDVPFHSSYAHSQSLDRLMNPLIDQYLYYLSRTNTPSGTTTQSRLQFSQAGASDIRDQSRNWLPGPCYRQQRVSKTSADNNNSEYSWTGATKYHLNGRDSLVNPGPAMASHKDDEEKFFPQSGVLIFGKQGPEKTNVDIEKVMITDEEEIRTTNPVATEQYGSVSTNLQSGNTQAATADVNTQGVLPGMVWQDRDVYLQGPIWAKIPHTDGHFHPSPLMGGFGLKHPPPQILIKNTPVPANPSTTFSAAKFASFITQYSTGQVSVEIEWELQKENSKRWNPEIQYTSNYNKSVNVDFTVDTNGVYSEPRPIGTRYLTRNL

SEQ ID NO: 230 - protein, 735 aa, Adeno-associated virus
MAADGYLPDWLEDTLSEGIRQWWKLKPGPPPPKPAERHKDDSRGLVLPGYKYLGPFNGLDKGEPVNEADAAALEHDKAYDRQLDSGDNPYLKYNHADAEFQERLKEDTSFGGNLGRAVFQAKKRVLEPLGLVEEPVKTAPGKKRPVEHSPAEPDSSSGTGKSGNQPARKRLNFGQTGDSDSVPDPQPLGQPPAAPSGLGTNTMATGSGAPMADNNEGADGVGNSSGNWHCDSTWMGDRVITTSTRTWALPTYNNHLYKQISSQSGASNDNHYFGYSTPWGYFDFNRFHCHFSPRDWQRLINNNWGFRPKRLNFKLFNIQVKEVTQNDGTTTIANNLTSTVQVFTDSEYQLPYVLGSAHQGCLPPFPADVFMVPQYGYLTLNNGSQAVGRSSFYCLEYFPSQMLRTGNNFTFSYTFEDVPFHSSYAHSQSLDRLMNPLIDQYLYYLSRTNTPSGTTTQSRLQFSQAGASDIRDQSRNWLPGPCYRQQRVSKTSADNNNSEYSWTGATKYHLNGRDSLVNPGPAMASHKDDEEKFFPQSGVLIFGKQGPEKTNVDIEKVMITDEEEIRTTNPVATEQYGSVSTNLQSGNTQAATADVNTQGVLPGMVWQDRDVYLQGPIWAKIPHTDGHFHPSPLMGGFGLKHPPPQILIKNTPVPANPSTTFSAAKFASFITQYSTGQVSVEIEWELQKENSKRWNPEIQYTSNYNKSVNVDFTVDTNGVYSEPRPIGTRYLTRNL

SEQ ID NO: 231 - protein, 735 aa, Adeno-associated virus; identical to SEQ ID NO: 230

SEQ ID NO: 232 - DNA, 2211 bp, Adeno-associated virus
atggctgccgatggttatcttccagattggctcgaggacactctctctgaaggaataagacagtggtggaagctcaaacctggcccaccaccaccaaagcccgcagagcggcataaggacgacagcaggggtcttgtgcttcctgggtacaagtacctcggacccttcaacggactcgacaagggggagccggtcaacgaggcagacgccgcggccctcgagcacgacaaggcctacgaccggcagctcgacagcggagacaacccgtacctcaagtacaaccacgccgacgcagagtttcaggagcgccttaaagaagatacgtcttttgggggcaacctcggacgagcagtcttccaggcgaaaaagagggttcttgaacctctgcggcctggtttgaggaaacctgttaagacggctccgggaaaaaagaggccggtagagcactctcctgtggagccagactcctcctcgggaaccggaaaagcgggccagcagcctgcaagaaaaagattaaattttggtcagactggagacgcagactccgtacctgacccccagcctctcggacagccaccagcagccccctctggtctgggatctactacaatggctacaggcagtggcgcaccaatggcagacaataacgagggtgccgatggagtgggtaattcctcaggaaattggcattgcgattcccaatggctggacgacagagtcatcgccaccagcacccgaacctgggccctgcccacatacaacaaccacctctacaagcaaatctccagccaatcaggagcctgcaacgacaaccactactttggctacagcaccccctgggggtattttgacttcaacagattccactgccacttttcaccacgtgactggcaaagactcatcaacagcaactggggattccggcccaaaagactcaacttcaagctctttaatattcaagtcaaagaggtcacgcagaatgacggtacgacgacgattgccaataaccttaccagcacggttcaggtgtttactgactcggagtaccagctcccgtacgtcccgggctcggcgcatcaaggatgcctcccgccgtttccagcggacgtcttcatggtcccacagtatggatacctcaccctgaacaacgggagtcaggcggtaggacgctcttccttttactgcctggagtactttccttctcagatgctgcgtactggaaacaactttcagttcagctacacttttgaagacgtgcctttccacagcagctacgctcactgccagagtctggatcggctgatgaatcctctgatcgaccagtacctgtattatctgaacaagacacaaacaaatagtggaactcttcagcagtctcggctactgtttagccaagctggaccaaccaacatgtctcttcaagctaaaaactggctgcctggaccttgctacagacagcagcgtctgtcaaaacaggcaaacgacaataacaactgcaactttccctggactgcagctacaaagtatcatctaaatggccgggactcgttggttaatccaggaccagctatggccagtcacaaggatgacgaagaaaagtttttccccatgcatggaaccctgatatttggtaaacaaggaacaaatgccaacgacgcggatttggaaaatgtcatgattacagatgaagaagaaatcaggcccaccaatcccgtggctacggagcagtacgggactgtgtcaaataatttgcaaaactcaaacactggtccaactacaggaactgtcaatcaccaaggagcgttacctggtatggtgtggcaggatcgagacgtgtacctgcagggacccatttgggccaagattcctcacaccgatggacactttcatccttctccactgatgggaggttttggactcaaacacccgcctcctcagatcatgatcaaaagcactcccgttccagccaatcctcccacaaacttcagttctgccaagtttgcttcttccatcacacagtattccacgggacaggtcagcgtggagatcgagtgggagctgcagaaggagaacagcaaacgctggaatcccgaaattcagtacacttccaactacaacaagtctgttaatgtggactttactgtggacactaatggtgtgtattcagagcctcgccccattggcaccagatacctgactcgtaatctgtaa

SEQ ID NO: 233 - protein, 736 aa, Adeno-associated virus
MAADGYLPDWLEDTLSEGIRQWWKLKPGPPPPKPAERHKDDSRGLVLPGYKYLGPFNGLDKGEPVNEADAAALEHDKAYDRQLDSGDNPYLKYNHADAEFQERLKEDTSFGGNLGRAVFQAKKRVLEPLRPGLRKPVKTAPGKKRPVEHSPVEPDSSSGTGKAGQQPARKRLNFGQTGDADSVPDPQPLGQPPAAPSGLGSTTMATGSGAPMADNNEGADGVGNSSGNWHCDSQWLDDRVIATSTRTWALPTYNNHLYKQISSQSGACNDNHYFGYSTPWGYFDFNRFHCHFSPRDWQRLINSNWGFRPKRLNFKLFNIQVKEVTQNDGTTTIANNLTSTVQVFTDSEYQLPYVPGSAHQGCLPPFPADVFMVPQYGYLTLNNGSQAVGRSSFYCLEYFPSQMLRTGNNFQFSYTFEDVPFHSSYAHCQSLDRLMNPLIDQYLYYLNKTQTNSGTLQQSRLLFSQAGPTNMSLQAKNWLPGPCYRQQRLSKQANDNNNCNFPWTAATKYHLNGRDSLVNPGPAMASHKDDEEKFFPMHGTLIFGKQGTNANDADLENVMITDEEEIRPTNPVATEQYGTVSNNLQNSNTGPTTGTVNHQGALPGMVWQDRDVYLQGPIWAKIPHTDGHFHPSPLMGGFGLKHPPPQIMIKSTPVPANPPTNFSSAKFASSITQYSTGQVSVEIEWELQKENSKRWNPEIQYTSNYNKSVNVDFTVDTNGVYSEPRPIGTRYLTRNL

SEQ ID NO: 234 - DNA, 2208 bp, Adeno-associated virus
atggctgccgatggttatcttccagattggctcgaggacactctctctgaaggaataagacagtggtggaagctcaaacctggcccaccaccaccaaagcccgcagagcggcataaggacgacagcaggggtcttgtgcttcctgggtacaagtacctcggacccttcaacggactcgacaagggagagccggtcaacgaggcagacgccgcggccctcgagcacgacaaggcctacgaccggcagctcgacagcggagacaacccgtacctcaagtacaaccacgccgacgcggagtttcaggagcgccttaaagaggatacgtcttttgggggcaacctcggacgagcagtcttccaggcaaaaaagagggttctggaacctctgggcctggttgaggagcctgttaagacggctccgggaaaaaagaggccggtagagcactctcctgcagagccagattcctcctccggaactggaaagtcgggcaaccagcctgcaagaaagagattgaatttcggtcagactggagactcagactccgtacctgacccccagcctctcggacagccaccagcagccccctctggtctgggaactaatacgatggctacaggcagtggcgcaccaatggcagacaataacgagggcgccgacggagtgggtaattcctcgggaaattggcattgcgattccacatggatgggcgacagagtcatcaccaccagcacccgaacctgggccctgcccacctacaacaaccatctgtacaagcaaatatccagccagtctggagccagcaacgacaatcactactttggctacagcaccccctgggggtattttgacttcaacagattccactgccacttttcaccacgtgactggcaaagactcatcaacaacaactggggattccgacccaagagactcaacttcaagctctttaacattcaagtcaaagaggtcacgcagaatgacggtacgacgacgattgccaataaccttaccagcacggttcaggtgtttactgactcggagtaccagctcccgtacgtcctcggctcggcgcatcaaggatgcctcccgccgttcccagcagacgtcttcatggtgccacagtatggatacctcaccctgaacaacgggagtcaggcagtaggacgctcttcattttactgcctagagtactttccttctcagatgctgcgtaccggaaacagctttaccttcagctacacctttgaggacgttcctttccacagcagctacgctcacagccagagtttggaccgtctcatgaatcctctcatcgaccagtacctgtattacttgagcagaacaaacactccaagcggaaccaccacgcagtccaggcttcagttttctcaggccggagcgagtgacattcgggaccagtctaggaactggcttcctggaccctgttaccgtcagcagcgagtatcaaagacatctgcggataacaacaacagtgaatactcgtggactggagctaccaagtaccacctcaatggcagagactctctggtgaatccgggcccggccatggccagccacaaagacgatgaagaaaagttctttcctcagagcggggttcttatctttgggaagcaaggctcagagaaaacaaatgtggatattgaaaaggtcatgattacagacgaagaggaaatcaggaccaccaatcccgtggctacggagcagtatggttctgtatctaccaacctccagagcggcaacacacaagcagctaccgcagatgtcaacacacaaggcgttcttccaggcatggtctggcaagacagagacgtgtacctgcaggggcctatttgggcaaagattccacacacggacggacattttcacccctctcccctcatgggcggatttggacttaaacaccctcctccacagattctcatcaagaacaccccggtacctgcgaatccttcgaccaccttcagtgcggcaaagtttgcttccttcattacacagtactccacggggcaggtcagcgtggagatcgagtgggagctgcagaaggagaacagcaaacgctggaatcccgagatccagtacacttccaactacaacaagtctgttaatgtggactttactgtggacactaatggcgtgtattcagagcctcgccccattggcaccagatacctgactcgtaatctgtaa

SEQ ID NO: 235 - protein, 735 aa, Adeno-associated virus
MAADGYLPDWLEDTLSEGIRQWWKLKPGPPPPKPAERHKDDSRGLVLPGYKYLGPFNGLDKGEPVNEADAAALEHDKAYDRQLDSGDNPYLKYNHADAEFQERLKEDTSFGGNLGRAVFQAKKRVLEPLGLVEEPVKTAPGKKRPVEHSPAEPDSSSGTGKSGNQPARKRLNFGQTGDSDSVPDPQPLGQPPAAPSGLGTNTMATGSGAPMADNNEGADGVGNSSGNWHCDSTWMGDRVITTSTRTWALPTYNNHLYKQISSQSGASNDNHYFGYSTPWGYFDFNRFHCHFSPRDWQRLINNNWGFRPKRLNFKLFNIQVKEVTQNDGTTTIANNLTSTVQVFTDSEYQLPYVLGSAHQGCLPPFPADVFMVPQYGYLTLNNGSQAVGRSSFYCLEYFPSQMLRTGNSFTFSYTFEDVPFHSSYAHSQSLDRLMNPLIDQYLYYLSRTNTPSGTTTQSRLQFSQAGASDIRDQSRNWLPGPCYRQQRVSKTSADNNNSEYSWTGATKYHLNGRDSLVNPGPAMASHKDDEEKFFPQSGVLIFGKQGSEKTNVDIEKVMITDEEEIRTTNPVATEQYGSVSTNLQSGNTQAATADVNTQGVLPGMVWQDRDVYLQGPIWAKIPHTDGHFHPSPLMGGFGLKHPPPQILIKNTPVPANPSTTFSAAKFASFITQYSTGQVSVEIEWELQKENSKRWNPEIQYTSNYNKSVNVDFTVDTNGVYSEPRPIGTRYLTRNL

SEQ ID NO: 236 - DNA, 2211 bp, Adeno-associated virus; identical to SEQ ID NO: 126

SEQ ID NO: 237 - protein, 736 aa, Adeno-associated virus
MAADGYLPDWLEDTLSEGIRQWWKLKPGPPPPKPAERHKDDSRGLVLPGYKYLGPGNGLDKGEPVNAADAAALEHDKAYDQQLKAGDNPYLKYNHADAEFQERLKEDTSFGGNLGRAVFQAKKRLLEPLGLVEEAAKTAPGKKRPVEQSPQEPDSSAGIGKSGSQPAKKKLNFGQTGDTESVPDPQPIGEPPAAPSGVGSLTMASGGGAPVADNNEGADGVGSSSGNWHCDSQWLGDRVITTSTRTWALPTYNNHLYKQISNSTSGGSSNDNAYFGYSTPWGYFDFNRFHCHFSPRDWQRLINNNWGFRPKRLNFKLFNIQVKEVTDNNGVKTIANNLTSTVQVFTDSDYQLPYVLGSAHEGCLPPFPADVFMIPQYGYLTLNDGGQAVGRSSFYCLEYFPSQMLRTGNNFQFSYEFENVPFHSSYAHSQSLDRLMNPLIDQYLYYLSKTINGSGQNQQTLKFSVAGPSNMAVQGRNYIPGPSYRQQRVSTTVTQNNNSEFAWPGASSWALNGRNSLMNPGPAMASHKEGEDRFFPLSGSLIFGKQGTGRDNVDADKVMITNEEEIKTTNPVATESYGQVATNHQSAQAQAQTGWVQNQGILPGMVWQDRDVYLQGPIWAKIPHTDGNFHPSPLMGGFGMKHPPPQILIKNTPVPADPPTAFNKDKLNSFITQYSTGQVSVEIEWELQKENSKRWNPEIQYTSNYYKSNNVEFAVSTEGVYSEPRPIGTRYLTRNL

SEQ ID NO: 238 - DNA, 2211 bp, Adeno-associated virus
atggctgccgatggttatcttccagattggctcgaggacactctctctgaaggaataagacagtggtggaagctcaaacctggcccaccaccaccaaagcccgcagagcggcataaggacgacagcaggggtcttgtgcttcctgggtacaagtacctcggacccggcaacggactcgacaagggggagccggtcaacgcagcagacgcggcggccctcgagcacgacaaggcctacgaccagcagctcaaggccggagacaacccgtacctcaagtacaaccacgccgacgccgagttccaggagcggctcaaagaagatacgtcttttgggggcaacctcgggcgagcagtcttccaggccaaaaagaggcttcttgaacctcttggtctggttgaggaagcggctaagacggctcctggaaagaagaggcctgtagagcagtctcctcaggaaccggactcctccgcgggtattggcaaatcgggttcacagcccgctaaaaagaaactcaatttcggtcagactggcgacacagagtcagtccccgaccctcaaccaatcggagaacctcccgcagccccctcaggtgtgggatctcttacaatggcttcaggtggtggcgcaccagtggcagacaataacgaaggtgccgatggagtgggtagttcctcgggaaattggcattgcgattcccaatggctgggggacagagtcatcaccaccagcacccgaacctgggccctgcccacctacaacaatcacctctacaagcaaatctccaacagcacatctggaggatcttcaaatgacaacgcctacttcggctacagcaccccctgggggtattttgacttcaacagattccactgccacttctcaccacgtgactggcagcgactcatcaacaacaactggggattccggcctaagcgactcaacttcaagctcttcaacattcaggtcaaagaggttacggacaacaatggagtcaagaccatcgccaataaccttaccagcacggtccaggtcttcacggactcagactatcagctcccgtacgtgctcgggtcggctcacgagggctgcctcccgccgttcccagcggacgttttcatgattcctcagtacgggtatctgacgcttaatgatgggagccaggccgtgggtcgttcgtccttttactgcctggaatatttcccgtcgcaaatgctaagaacgggtaacaacttccagttcagctacgagtttgagaacgtacctttccatagcagctacgctcacagccaaagcctggaccgactaatgaatccactcatcgaccaatacttgtactatctctcaaagactattaacggttctggacagaatcaacaaacgctaaaattcagcgtggccggacccagcaacatggctgtccagggaagaaactacatacctggacccagctaccgacaacaacgtgtctcaaccactgtgactcaaaacaacaacagcgaatttgcttggcctggagcttcttcttgggctctcaatggacgtaatagcttgatgaatcctggacctgctatggccagccacaaagaaggagaggaccgtttctttcctttgtctggatctttaatttttggcaaacaaggaactggaagagacaacgtggatgcggacaaagtcatgataaccaacgaagaagaaattaaaactactaacccggtagcaacggagtcctatggacaagtggccacaaaccaccagagtgcccaagcacaggcgcagaccggctgggttcaaaaccaaggaatacttccgggtatggtttggcaggacagagatgtgtacctgcaaggacccatttgggccaaaattcctcacacggacggcaactttcacccttctccgctaatgggagggtttggaatgaagcacccgcctcctcagatcctcatcaaaaacacacctgtacctgcggatcctccaacggctttcaataaggacaagctgaactctttcatcacccagtattctactggccaagtcagcgtggagattgagtgggagctgcagaaggaaaacagcaagcgctggaacccggagatccagtacacttccaactattacaagtctaataatgttgaatttgctgttaatactgaaggtgtatatagtgaaccccgccccattggcaccagatacctgactcgtaatctgtaa

SEQ ID NO: 239 - protein, 736 aa, Adeno-associated virus
MAADGYLPDWLEDTLSEGIRQWWKLKPGPPPPKPAERHKDDSRGLVLPGYKYLGPGNGLDKGEPVNAADAAALEHDKAYDQQLKAGDNPYLKYNHADAEFQERLKEDTSFGGNLGRAVFQAKKRLLEPLGLVEEAAKTAPGKKRPVEQSPQEPDSSAGIGKSGSQPAKKKLNFGQTGDTESVPDPQPIGEPPAAPSGVGSLTMASGGGAPVADNNEGADGVGSSSGNWHCDSQWLGDRVITTSTRTWALPTYNNHLYKQISNSTSGGSSNDNAYFGYSTPWGYFDFNRFHCHFSPRDWQRLINNNWGFRPKRLNFKLFNIQVKEVTDNNGVKTIANNLTSTVQVFTDSDYQLPYVLGSAHEGCLPPFPADVFMIPQYGYLTLNDGSQAVGRSSFYCLEYFPSQMLRTGNNFQFSYEFENVPFHSSYAHSQSLDRLMNPLIDQYLYYLSKTINGSGQNQQTLKFSVAGPSNMAVQGRNYIPGPSYRQQRVSTTVTQNNNSEFAWPGASSWALNGRNSLMNPGPAMASHKEGEDRFFPLSGSLIFGKQGTGRDNVDADKVMITNEEEIKTTNPVATESYGQVATNHQSAQAQAQTGWVQNQGILPGMVWQDRDVYLQGPIWAKIPHTDGNFHPSPLMGGFGMKHPPPQILIKNTPVPADPPTAFNKDKLNSFITQYSTGQVSVEIEWELQKENSKRWNPEIQYTSNYYKSNNVEFAVNTEGVYSEPRPIGTRYLTRNL

SEQ ID NO: 240 - DNA, 2208 bp, Adeno-associated virus
atggctgccgatggttatcttccagattggctcgaggacactctctctgaaggaataagacagcggtggaagctcaaacctggcccaccaccaccagagcccgcagagcggcataaggacgacagcaggggtcttgtgcttcctgggtacaagtacctcggacccttcaacggactcgacaagggagagccggtcaacgaggcagacgccgcggccctcgagcacgacaaagcctacgaccggcagctcgacagcggagacaacccgtacctcaagtacaaccacgccgacgcggagtttcaggagcgccttaaagaagatacgtcttttgggggcaacctcggacgagcagtcttccaggcgaaaaagagggtacttgaacctctgggcctggttgaggaacctgttaagacggctccgggaaaaaagaggccggtagagcactctcctgtggagccagactcctcctcgggaaccggaaaggcgggccagcagcctgcaagaaaaagattgaattttggtcagactggagacgcagactcagtacctgacccccagcctctcggacagccaccagcagccccctctggtctgggaactaatacgatggctacaggcagtggcgcaccaatggcagacaataacgagggcgccgacggagtgggtaattcctcgggaaattggcattgcgattccacatggatgggcgacagagtcatcaccaccagcacccgaacctgggccctgcccacctacaacaaccacctctacaaacaaatttccagccaatcaggagcctcgaacgacaatcactactttggctacagcaccccttgggggtattttgacttcaacagattccactgccacttttcaccacgtgactggcaaagactcatcaacaacaactggggattccgacccaagagactcaacttcaagctctttaacattcaagtcaaagaggtcacgcagaatgacggtacgacgacgattgccaataaccttaccggcacggttcaggtgtttactgactcggagtaccagctcccgtacgtcctcggctcggcgcatcaaggatgcctcccgccgttcccagcagacgtcttcatggtgccacagtatggatacctcaccctgaacaacgggagtcaggcagtaggacgctcttcattttactgcctggagtactttccttctcagatgctgcgtaccggaaacaactttaccttcagctacacttttgaggacgttcctttccacagcagctacgctcacagccagagtctgggccgtctcatgaatcctctcatcgaccagtacctgtattacttgagcagaacaaacactccaagtggaaccaccacgcagtcaaggcttcagttttctcaggccggagcgagtgacattcgggaccagtctaggaactggcttcctggaccctgttaccgccagcagcgagtatcaaagacatctgcggataacaacaacagtgaatactcgtggactggagctaccaagtaccacctcaatggcagagactctctggtgaatccgggcccggccatggcaagccacaaggacgatgaagaaaagttttttcctcagagcggggttctcatctttgggaagcaaggctcagagaaaacaaatgtggacattgaaaaggtcatgattacagacgaagaggaaatcaggacaaccaatcccgtggctacggagcagtatggttctgtatctaccaacctccagagaggcaacagacaagcagctaccgcagatgtcaacacacaaggcgttcttccaggcatggtctggcaggacagagatgtgtaccttcaggggcccatctgggcaaagattccacacacggacggacattttcacccctctcccctcatgggtggattcggacttaaacaccctcctccacagattctcatcaagaacaccccggtacctgcgaatccttcgaccaccttcagtgcggcaaagtttgcttccttcatcacacagtactccacgggacaggtcagcgtggagatcgagtgggagctgcagaaggaaaacagcaaacgctggaatcccgaaattcagtacacttccaactacaacaagtctgttaatgtggactttactgtggacactaatggcgtgtattcagagcctcgccccattggcaccagatacctgactcgtaatctgtaa

SEQ ID NO: 241 - protein, 735 aa, Adeno-associated virus
MAADGYLPDWLEDTLSEGIRQRWKLKPGPPPPEPAERHKDDSRGLVLPGYKYLGPFNGLDKGEPVNEADAAALEHDKAYDRQLDSGDNPYLKYNHADAEFQERLKEDTSFGGNLGRAVFQAKKRVLEPLGLVEEPVKTAPGKKRPVEHSPVEPDSSSGTGKAGQQPARKRLNFGQTGDADSVPDPQPLGQPPAAPSGLGTNTMATGSGAPMADNNEGADGVGNSSGNWHCDSTWMGDRVITTSTRTWALPTYNNHLYKQISSQSGASNDNHYFGYSTPWGYFDFNRFHCHFSPRDWQRLINNNWGFRPKRLNFKLFNIQVKEVTQNDGTTTIANNLTGTVQVFTDSEYQLPYVLGSAHQGCLPPFPADVFMVPQYGYLTLNNGSQAVGRSSFYCLEYFPSQMLRTGNNFTFSYTFEDVPFHSSYAHSQSLGRLMNPLIDQYLYYLSRTNTPSGTTTQSRLQFSQAGASDIRDQSRNWLPGPCYRQQRVSKTSADNNNSEYSWTGATKYHLNGRDSLVNPGPAMASHKDDEEKFFPQSGVLIFGKQGSEKTNVDIEKVMITDEEEIRTTNPVATEQYGSVSTNLQRGNRQAATADVNTQGVLPGMVWQDRDVYLQGPIWAKIPHTDGHFHPSPLMGGFGLKHPPPQILIKNTPVPANPSTTFSAAKFASFITQYSTGQVSVEIEWELQKENSKRWNPEIQYTSNYNKSVNVDFTVDTNGVYSEPRPIGTRYLTRNL

SEQ ID NO: 242 - DNA, 2208 bp, Adeno-associated virus
atggctgccgatggttatcttccagattggctcgaggacactctctctgaaggaataagacagcggtggaagctcaaacctggcccaccaccaccagagcccgcagagcggcataaggacgacagcaggggtcttgtgcttcctgggtacaagtacctcggacccttcaacggactcgacaagggagagccggtcaacgaggcagacgccgcggccctcgagcacgacaaagcctacgaccggcagctcgacagcggagacaacccgtacctcaagtacaaccacgccgacgcggagtttcaggagcgccttaaagaagatacgtcctttgggggcaacctcggacgagcagtcttccaggcgaaaaagagggtacttgaacctctgggcctggttgaggaacctgttaagacggctccgggaaaaaagaggccggtagagcactctcctgtggagccagactcctcctcgggaaccggaaaggcgggccagcagcctgcaagaaaaagattgaattttggtcagactggagacgcagactcagtacctgacccccagcctctcggacagccaccagcagccccctctggtctgggaactaatacgatggctacaggcagtggcgcaccaatggcagacaataacgagggcgccgacggagtgggtaattcctcgggaaattggcattgcgattccacatggatgggcgacagagtcatcaccaccagcacccgaacctgggccctgcccacctacaacaaccacctctacaaacaaatttccagccaatcaggagcctcgaacgacaatcactactttggctacagcaccccttgggggtattttgacttcaacagattccactgccacttttcaccacgtgactggcaaagactcatcaacaacaactggggattccgacccaagagactcaacttcaagctctttaacattcaagtcaaagaggtcacgcagaatgacggtacgacgacgattgccaataaccttaccagcacggttcaggtgtttactgactcggagtaccagctcccgtacgtcctcggctcggcgcatcaaggatgcctcccgccgttcccagcagacgtcttcatggtgccacagtatggatacctcaccctgaacaacgagagtcaggcagtaggacgctcttcattttactgcctggagtactttccttctcagatgctgcgtaccggaaacaactttaccttcagctacacttttgaggacgttcctttccacagcagctacgctcacagccagagtctgggccgtctcatgaatcctctcatcgaccagtacctgtattacttgagcagaacaaacactccaagtggaaccaccacgcagtcaaggcttcagttttctcaggccggagcgagtgacattcgggaccagtctaggaactggcttcctggaccctgttaccgccagcagcgagtatcaaagacatctgcggataacaacaacagtgaatactcgtggactggagctaccaagtaccacctcaatggcagagactctctggtgaatccgggcccggccatggcaagccacaaggacgatgaagaaaagttttttcctcagagcggggttctcatctttgggaagcaaggctcagagaaaacaaatgtggacattgaaaaggtcatgattacagacgaagaggaaatcaggacaaccaatcccgtggctacggagcagtatggttctgtatctaccaacctccagagaggcaacagacaagcagctaccgcagatgtcaacacacaaggcgttcttccaggcatggtctggcaggacagagatgtgtaccttcaggggcccatctgggcaaagattccacacacggacggacattttcacccctctcccctcatgggtggattcggacttaaacaccctcctccacagattctcatcaagaacaccccggtacctgcgaatccttcgaccaccttcagtgcggcaaagtttgcttccttcatcacacagtactccacgggacaggtcagcgtggagatcgagtgggagctgcagaaggaaaacagcaaacgctggaatcccgaaattcagtacacttccaactacaacaagtctgttaatgtggactttactgtggacactaatggcgtgtattcagagcctcgccccattggcaccagatacctgactcgtaatctgtaa

SEQ ID NO: 243 - protein, 735 aa, Adeno-associated virus
MAADGYLPDWLEDTLSEGIRQRWKLKPGPPPPEPAERHKDDSRGLVLPGYKYLGPFNGLDKGEPVNEADAAALEHDKAYDRQLDSGDNPYLKYNHADAEFQERLKEDTSFGGNLGRAVFQAKKRVLEPLGLVEEPVKTAPGKKRPVEHSPVEPDSSSGTGKAGQQPARKRLNFGQTGDADSVPDPQPLGQPPAAPSGLGTNTMATGSGAPMADNNEGADGVGNSSGNWHCDSTWMGDRVITTSTRTWALPTYNNHLYKQISSQSGASNDNHYFGYSTPWGYFDFNRFHCHFSPRDWQRLINNNWGFRPKRLNFKLFNIQVKEVTQNDGTTTIANNLTSTVQVFTDSEYQLPYVLGSAHQGCLPPFPADVFMVPQYGYLTLNNESQAVGRSSFYCLEYFPSQMLRTGNNFTFSYTFEDVPFHSSYAHSQSLGRLMNPLIDQYLYYLSRTNTPSGTTTQSRLQFSQAGASDIRDQSRNWLPGPCYRQQRVSKTSADNNNSEYSWTGATKYHLNGRDSLVNPGPAMASHKDDEEKFFPQSGVLIFGKQGSEKTNVDIEKVMITDEEEIRTTNPVATEQYGSVSTNLQRGNRQAATADVNTQGVLPGMVWQDRDVYLQGPIWAKIPHTDGHFHPSPLMGGFGLKHPPPQILIKNTPVPANPSTTFSAAKFASFITQYSTGQVSVEIEWELQKENSKRWNPEIQYTSNYNKSVNVDFTVDTNGVYSEPRPIGTRYLTRNL

SEQ ID NO: 244 - DNA, 2208 bp, Adeno-associated virus
atggctgccgatggttatcttccagattggctcgaggacactctctctgaaggaataagacagcggtggaagctcaaacctggcccaccaccaccagagcccgcagagcggcataaggacgacagcaggggtcttgtgcttcctgggtacaagtacctcggacccttcaacggactcgacaagggagagccggtcaacgaggcagacgccgcggccctcgagcacgacaaagcctacgaccggcagctcgacagcggagacaacccgtacctcaagtacaaccacgccgacgcggagtttcaggagcgccttaaagaagatacgtcttttgggggcaacctcggacgagcagtcttccaggcgaaaaagagggtacttgaacctctgggcctggttgaggaacctgttaagacggctccgggaaaaaagaggccggtagagcactctcctgtggagccagactcctcctcgggaaccggaaaggcgggccagcagcctgcaagaaaaagattgaattttggtcagactggagacgcagactcagtacctgacccccagcctctcggacagccaccagcagccccctctggtctgggaactaatacgatggctacaggcagtggcgcaccaatggcagacaataacgagggcgccgacggagtgggtaattcctcgggaaattggcattgcgattccacatggatgggcgacagagtcatcaccaccagcacccgaacctgggccctgcccacctacaacaaccacctctacaaacaaatttccagccaatcaggagcctcgaacgacaatcactactttggctacagcaccccttgggggtattttgacttcaacagattccactgccacttttcaccacgtgactggcaaagactcatcaacaacaactggggattccgacccaagagactcaacttcaagctctttaacattcaagtcaaagaggtcacgcagaatgacggtacgacgacgattgccaataaccttaccagcacggttcaggtgtttactgactcggagtaccagctcccgtacgtcctcggctcggcgcatcaaggatgcctcccgccgttcccagcagacgtcttcatggtaccacagtatggatacctcaccctgaacaacgggagtcaggcagtaggacgctcttcattttactgcctggagtactttccttctcagatgctgcgtaccggaaacaactttaccttcagctacacttttgaggacgttcctttccacagcagctacgctcacagccagagtctgggccgtctcatgaatcctctcatcgaccagtacctgtattacttgagcagaacaaacactccaagtggaaccaccacgcagtcaaggcttcagttttctcaggccggagcgagtgacattcgggaccagtctaggaactggcttcctggaccctgttaccgccagcagcgagtatcaaagacatctgcggataacaacaacagtgaatactcgtggactggagctaccaagtaccacctcaatggcagagactctctggtgaatccgggcccggccatggcaagccacaaggacgatgaagaaaagttttttcctcagagcggggttctcatctttgggaagcaaggctcagagaaaacaaatgtggacattgaaaaggtcatgattacagacgaagaggaaatcaggacaaccaatcccgtggctacggagcagtatggttctgtatctaccaacctccagagaggcaacagacaagcagctaccgcagatgtcaacacacaaggcgttcttccaggcatggtctggcaggacagagatgtgtaccttcaggggcccatctgggcaaagattccacacacggacggacattttcacccctctcccctcatgggtggattcggacttaaacaccctcctccacagattctcatcaagaacaccccggtacctgcgaatccttcgaccaccttcagtgcggcaaagtttgcttccttcatcacacagtactccacgggacaggtcagcgtggagatcgagtgggagctgcagaaggaaaacagcaaacgctggaatcccgaaattcagtacacttccaactacaacaagtctgttaatgtggactttactgtggacactaatggcgtgtattcagagcctcgccccattggcaccagatacctgactcgtaatctgtaa

SEQ ID NO: 245 - protein, 735 aa, Adeno-associated virus
MAADGYLPDWLEDTLSEGIRQRWKLKPGPPPPEPAERHKDDSRGLVLPGYKYLGPFNGLDKGEPVNEADAAALEHDKAYDRQLDSGDNPYLKYNHADAEFQERLKEDTSFGGNLGRAVFQAKKRVLEPLGLVEEPVKTAPGKKRPVEHSPVEPDSSSGTGKAGQQPARKRLNFGQTGDADSVPDPQPLGQPPAAPSGLGTNTMATGSGAPMADNNEGADGVGNSSGNWHCDSTWMGDRVITTSTRTWALPTYNNHLYKQISSQSGASNDNHYFGYSTPWGYFDFNRFHCHFSPRDWQRLINNNWGFRPKRLNFKLFNIQVKEVTQNDGTTTIANNLTSTVQVFTDSEYQLPYVLGSAHQGCLPPFPADVFMVPQYGYLTLNNGSQAVGRSSFYCLEYFPSQMLRTGNNFTFSYTFEDVPFHSSYAHSQSLGRLMNPLIDQYLYYLSRTNTPSGTTTQSRLQFSQAGASDIRDQSRNWLPGPCYRQQRVSKTSADNNNSEYSWTGATKYHLNGRDSLVNPGPAMASHKDDEEKFFPQSGVLIFGKQGSEKTNVDIEKVMITDEEEIRTTNPVATEQYGSVSTNLQRGNRQAATADVNTQGVLPGMVWQDRDVYLQGPIWAKIPHTDGHFHPSPLMGGFGLKHPPPQILIKNTPVPANPSTTFSAAKFASFITQYSTGQVSVEIEWELQKENSKRWNPEIQYTSNYNKSVNVDFTVDTNGVYSEPRPIGTRYLTRNL

SEQ ID NO: 246 - DNA, 2208 bp, Adeno-associated virus
atggctgccgatggttatcttccagattggctcgaggacactctctctgaaggaataagacagcggtggaagctcaaacctggcccaccaccaccagagcccgcagagcggcataaggacgacagcaggggtcttgtgcttcctgggtacaagtacctcggacccttcaacggactcgacaagggagagccggtcaacgaggcagacgccgcggccctcgagcacgacaaagcctacgaccggcagctcgacagcggagacaacccgtacctcaagtacaaccacgccgacgcggagtttcaggagcgccttaaagaagatacgtcttttgggggcaacctcggacgagcagtcttccaggcgaaaaagagggtactcgaacctctgggcctggttgaggaacctgttaagacggctccgggaaaaaagaggccggtagagcactctcctgtggagccagactcctcctcgggaaccggaaaggcgggccagcagcctgcaagaaaaagattgaattttggtcagactggagacgcagactcagtacctgacccccagcctctcggacagccaccagcagccccctctggtctgggaactaatacgatggctacaggcagtggcgcaccaatggcagacaataacgagggcgccgacggagtgggtaattcctcgggaaattggcattgcgattccacatggatgggcgacagagtcatcaccaccagcacccgaacctgggccctgcccacctacaacaaccacctctacaaacaaatttccagccaatcaggagcctcgaacgacaatcactactttggctacagcaccccttgggggtattttgacttcaacagattccactgccacttttcaccacgtgactggcaaagactcatcaacaacaactggggattccgacccaagagactcaacttcaagctctttaacattcaagtcaaagaggtcacgcagaatgacggtacgacgacgattgccaataaccttaccagcacggttcaggtgtttactgactcggagtaccagctcccgtacgtcctcggctcggcgcatcaaggatgcctcccgccgttcccagcagacgtcttcatggtgccacagtatggatacctcaccctgaacaacgggagtcaggcagcaggacgctcttcattttactgcctggagtactttccttctcagatgctgcgtaccggaaacaactttaccttcagctacacttttgaggacgttcctttccacagcagctacgctcacagccagagtctgggccgtctcatgaatcctctcatcgaccagtacctgtattacttgagcagaacaaacactccaagtggaaccaccacgcagtcaaggcttcagttttctcaggccggagcgagtgacattcgggaccagtctaggaactggcttcctggaccctgttaccgccagcagcgagtatcaaagacatctgcggataacaacaacagtgaatactcgtggactggagctaccaagtaccacctcaatggcagagactctctggtgaatccgggcccggccatggcaagccacaaggacgatgaagaaaagttttttcctcagagcggggttctcatctttgggaagcaaggctcagagaaaacaaatgtggacattgaaaaggtcatgattacagacgaagaggaaatcaggacaaccaatcccgtggctacggagcagtatggttctgtatctaccaacctccagagaggcaacagacaagcagctaccgcagatgtcaacacacaaggcgttcttccaggcatggtctggcaggacagagatgtgtaccttcaggggcccatctgggcaaagattccacacacggacggacattttcacccctctcccctcatgggtggattcggacttaaacaccctcctccacagattctcatcaagaacaccccggtacctgcgaatccttcgaccaccttcagtgcggcaaagtttgcttccttcatcacacagtactccacgggacaggtcagcgtggagatcgagtgggagctgcagaaggaaaacagcaaacgctggaatcccgaaattcagtacacttccaactacaacaagtccgttaatgtggactttactgtggacactaatggcgtgtattcagagcctcgccccattggcaccagatacctgactcgtaatctgtaa

SEQ ID NO: 247 - protein, 735 aa, Adeno-associated virus
MAADGYLPDWLEDTLSEGIRQRWKLKPGPPPPEPAERHKDDSRGLVLPGYKYLGPFNGLDKGEPVNEADAAALEHDKAYDRQLDSGDNPYLKYNHADAEFQERLKEDTSFGGNLGRAVFQAKKRVLEPLGLVEEPVKTAPGKKRPVEHSPVEPDSSSGTGKAGQQPARKRLNFGQTGDADSVPDPQPLGQPPAAPSGLGTNTMATGSGAPMADNNEGADGVGNSSGNWHCDSTWMGDRVITTSTRTWALPTYNNHLYKQISSQSGASNDNHYFGYSTPWGYFDFNRFHCHFSPRDWQRLINNNWGFRPKRLNFKLFNIQVKEVTQNDGTTTIANNLTSTVQVFTDSEYQLPYVLGSAHQGCLPPFPADVFMVPQYGYLTLNNGSQAAGRSSFYCLEYFPSQMLRTGNNFTFSYTFEDVPFHSSYAHSQSLGRLMNPLIDQYLYYLSRTNTPSGTTTQSRLQFSQAGASDIRDQSRNWLPGPCYRQQRVSKTSADNNNSEYSWTGATKYHLNGRDSLVNPGPAMASHKDDEEKFFPQSGVLIFGKQGSEKTNVDIEKVMITDEEEIRTTNPVATEQYGSVSTNLQRGNRQAATADVNTQGVLPGMVWQDRDVYLQGPIWAKIPHTDGHFHPSPLMGGFGLKHPPPQILIKNTPVPANPSTTFSAAKFASFITQYSTGQVSVEIEWELQKENSKRWNPEIQYTSNYNKSVNVDFTVDTNGVYSEPRPIGTRYLTRNL

SEQ ID NO: 248 - protein, 738 aa, Adeno-associated virus; identical to SEQ ID NO: 90

SEQ ID NO: 249 - DNA, 2217 bp, Adeno-associated virus
atggctgctgacggttatcttccagattggctcgaggacaacctctctgagggcattcgcgagtggtgggacctgaaacctggagcccccaagcccaaggccaaccagcagaagcaggacgacggccggggtctggtgcttcctggctacaagtacctcggacccttcaacggactcgacaagggggagcccgtcaacgcggcggacgcagcggccctcgagcacgacaaggcctacgaccagcagctcaaagcgggtgacaatccgtacctgcggtataaccacgccgacgccgagtttcaggagcgtctgcaagaagatacgtcttttgggggcaacctcgggcgagcagtcttccaggccaagaagcgggttctcgaacctctcggtctggttgaggaagctgctaagacggctcctggaaagaagagaccggtagaaccgtcacctcagcgttcccccgactcctccacgggcatcggcaagaaaggccagcagcccgctaaaaagagactgaactttggtcagactggcgactcagagtcagtccccgaccctcaaccaatcggagaaccaccagcaggcccctctggtctgggatctggtacaatggctgcaggcggtggcgctccaatggcagacaataacgaaggcgccgacggagtgggtagttcctcaggaaattggcattgcgattccacatggctgggcgacagagtcatcaccaccagcacccgaacctgggccctgcccacctacaacaaccacctctacaagcaaatatccaatgggacatcgggaggaagcaccaacgacaacacctacttcggctacagcaccccctgggggtattttgacttcaacagattccactgccacttctcaccacgtgactggcagcgactcatcaacaacaactggggattccggccaaaaagactcagcttcaagctcttcaacatccaggtcaaggaggtcacgcagaatgaaggcaccaagaccatcgccaataaccttaccagcacgattcaggtatttacggactcggaataccagctgccgtacgtcctcggctccgcgcaccagggctgcctgcctccgttcccggcggacgtcttcatgattccccagtacggctaccttacactgaacaatggaagtcaagccgtaggccgttcctccttctactgcctggaatattttccatctcaaatgctgcgaactggaaacaattttgaattcagctacaccttcgaggacgtgcctttccacagcagctacgcacacagccagagcttggaccgactgatgaatcctctcatcgaccagtacctgtactacttatccagaactcagtccacaggaggaactcaaggtacccagcaattgttattttctcaagctgggcctgcaaacatgtcggctcaggctaagaactggctacctggaccttgctaccggcagcagcgagtctctacgacactgtcgcaaaacaacaacagcaactttgcttggactggtgccaccaaatatcacctgaacggaagagactctttggtaaatcccggtgtcgccatggcaacccacaaggacgacgaggaacgcttcttcccgtcgagtggagtcctgatgttcggaaaacagggtgctggaagagacaatgtggactacagcagcgttatgctaaccagcgaagaagaaattaaaaccactaaccccgtagccacagaacaatacggtgtggtggctgacaacttgcagcaaaccaatacagggcctattgtgggaaatgtcaacagccaaggagccttacctggcatggtctggcagaaccgagacgtgtacctgcagggtcccatctgggccaagattcctcacacggacggcaacttccacccttcaccgctaatgggaggatttggactgaagcacccacctcctcagatcctgatcaagaacacgccggtacctgcggatcctccaacaacgttcagccaggcgaaattggcttccttcattacgcagtacagcaccggacaggtcagcgtggaaatcgagtgggagctgcagaaggagaacagcaaacgctggaacccagagattcagtacacttcaaactactacaaatctacaaatgtggactttgctgtcaatacagagggaacttattctgagcctcgccccattggtactcgttacctcacccgtaatctgtaa

SEQ ID NO: 250 - protein, 738 aa, Adeno-associated virus
MAADGYLPDWLEDNLSEGIREWWDLKPGAPKPKANQQKQDDGRGLVLPGYKYLGPFNGLDKGEPVNAADAAALEHDKAYDQQLKAGDNPYLRYNHADAEFQERLQEDTSFGGNLGRAVFQAKKRVLEPLGLVEEAAKTAPGKKRPVEPSPQRSPDSSTGIGKKGQQPAKKRLNFGQTGDSESVPDPQPIGEPPAGPSGLGSGTMAAGGGAPMADNNEGADGVGSSSGNWHCDSTWLGDRVITTSTRTWALPTYNNHLYKQISNGTSGGSTNDNTYFGYSTPWGYFDFNRFHCHFSPRDWQRLINNNWGFRPKRLSFKLFNIQVKEVTQNEGTKTIANNLTSTIQVFTDSEYQLPYVLGSAHQGCLPPFPADVFMIPQYGYLTLNNGSQAVGRSSFYCLEYFPSQMLRTGNNFEFSYTFEDVPFHSSYAHSQSLDRLMNPLIDQYLYYLSRTQSTGGTQGTQQLLFSQAGPANMSAQAKNWLPGPCYRQQRVSTTLSQNNNSNFAWTGATKYHLNGRDSLVNPGVAMATHKDDEERFFPSSGVLMFGKQGAGRDNVDYSSVMLTSEEEIKTTNPVATEQYGVVADNLQQTNTGPIVGNVNSQGALPGMVWQNRDVYLQGPIWAKIPHTDGNCHPSPLMGGFGLKHPPPQILIKNTPVPADPPTTFSQAKLASFITQYSTGQVSVEIEWELQKENSKRWNPEIQYTSNYYKSTNVDFAVNTEGTYSEPRPIGTRYLTRNL

SEQ ID NO: 251 - protein, 738 aa, Adeno-associated virus
MAADGYLPDWLEDNLSEGIREWWDLKPGAPKPKANQQKQDDGRGLVLPGYKYLGPFNGLDKGEPVNAADAAALEHDKAYDQQLKAGDNPYLRYNHADAEFQERLQEDTSFGGNLGRAVFQAKKRVLEPLGLVEEGAKTAPGKKRPVEPSPQRSPDSSTGIGKKGQQPARKRLNFGRTGDSESVPDPQPIGEPPAAPSSVGSGTMAAGGGAPMADNNEGADGVGSSSGNWHCDSTWLGDRVITTSTRTWALPTYNNHLYKQISNGTSGGSTNDNTYFGYSTPWGYLDFNRFHCHFSPRDWQRLINNNWGFRPKRLSFKLFNIQVKEVTQNEGTKTIANNLASTIQVFTDSEYQPPYVLGSAHQGCLPPFPADVFMIPQYGYLTLNNGSQAVGRSSFYCLEYFPSQMLRTGNNFSFSYTFEDVPFHSSYAHSQSLDRLMNPLIDQYLYYLSRTQSTGGTAGTQQLLFSRAGPSNMSAQARNWLPGPCYRQQRVSTTLSQNNNSNFAWTGATKYHLNGRDSLVNPGVAMATNKDDEDRFFPSSGILMFGKQGAGKDNVDYSNVMLTSEEEIKTTNPVATEQYGVVADNLQQQNTAPTVGAVNSQGALPGMVWQNRDVYLQGPIWAKIPHTDGNFHPSPLMGGFGLKHPPPQILIKNTPVPADPPTAFNQAKLNSFIAQYSTGQVSVEIEWELQKENSKRWNPEIQYTSNYYKSTNADFAVNTEGVYSEPRPIGTRYLTRNL

SEQ ID NO: 252 - DNA, 2217 bp, Adeno-associated virus
atggctgccgatggttatcttccagattggctcgaggacaacctctctgagggcattcgcgagtggtgggacctgaaacctggagccccgaaacccaaagccaaccagcaaaagcaggacgacggccggggtctggtgcttcctggctacaagtacctcggacccttcaacggactcgacaagggggagcccgtcaacgcggcggacgcagcggccctcgagcacgacaaggcctacgaccagcagctcaaagcgggtgacaatccgtacctgcggtataatcacgccgacgccgagtttcaggagcgtctgcaagaagatacgtcttttgggggcaacctcgggcgagcagtcttccaggccaagaagcgggttctcgaacctctcggtctggttgaggaaggcgctaagacggctcctggaaagaagagaccggtagagccgtcaccacagcgttcccccgactcctccacgggcatcggcaagaaaggccagcagcccgccagaaagagactcaatttcggtcggactggcgactcagagtcagtccccgaccctcaacctatcggagaacctccagcagcgccctctagtgtgggatctggtacaatggctgcaggcggtggcgcaccaatggcagacaataacgaaggtgccgacggagtgggtagttcctcgggaaattggcattgcgattccacatggctgggcgacagagttatcaccaccagcacccgaacctgggccctgcccacctacaacaaccacctctacaagcaaatctccaacgggacctcgggaggcagcaccaacgacaacacctactttggctacagcaccccctgggggtatcttgactttaacagattccactgccacttctcaccacgtgactggcagcgactcatcaacaacaactggggattccggcccaagagactcagcttcaagctcttcaacatccaggtcaaagaggtcacgcagaatgaaggcaccaagaccatcgccaataacctcgccagcaccatccaggtgtttacggactcggaataccagccgccgtacgtcctcggctctgcccaccagggctgcctgcctccgttcccggcggacgtcttcatgattcctcagtacggctacctgactctcaacaacggtagtcaggccgtgggacgttcctccttctactgcctggagtacttcccctctcagatgctgagaacgggcaacaacttttccttcagctacactttcgaggacgtgcctttccacagcagctacgcgcacagccagagtttggacaggctgatgaatcctctcatcgaccagtacctgtactacctgtcaagaacccagtctacgggaggcacagcgggaacccagcagttgctgttttctcgggccgggcctagcaacatgtcggctcaggccagaaactggctgcctggaccctgctacagacagcagcgcgtctccacgacactgtcgcaaaacaacaacagcaactttgcctggactggtgccaccaagtatcatctgaacggcagagactctctggtgaatccgggcgtcgccatggcaaccaacaaggacgacgaggaccgcttcttcccatccagcggcatcctcatgtttggcaagcagggagctggaaaagacaacgtggactatagcaacgtgatgctaaccagcgaggaagaaatcaagaccaccaaccccgtggccacagaacagtatggcgtggtggctgataacctacagcagcaaaacaccgctcctactgtgggggccgtcaacagccagggagccttacctggcatggtctggcagaaccgggacgtgtacctgcagggtcctatttgggccaagattcctcacacagatggcaactttcacccgtctcctttaatgggcggctttggacttaaacatccgcctcctcagatcctcatcaaaaacactcctgttcctgcggatcctccaacagcgttcaaccaggccaagctgaattctttcatcgcgcagtacagcaccggacaagtcagcgtggagatcgagtgggagctgcagaaggagaacagcaagcgctggaacccagagattcagtatacttccaactactacaaatctacaaatgcggactttgctgttaatactgagggtgtttactctgagcctcgccccattggcactcgttacctcacccgtaatctgtaa

SEQ ID NO: 253 - DNA, 2208 bp, Adeno-associated virus
atggctgccgatggttatcttccagattggctcgaggacactctctctgaaggaataagacagtggtggaagctcaaacctggcccaccaccaccaaagcccgcagagcggcataaggacgacagcaggggtcttgtgcttcctgggtacaagtacctcggacccttcaacggactcgacaagggggagccggtcaacgaggcagacgccgcggccctcgagcacgacaaggcctacgaccggcagctcgacagcggagacaacccgtacctcaagtacaaccacgccgacgcagagtttcaggagcgccttaaagaagatacgtcttttgggggcaacctcggacgagcagtcttccaggcgaaaaagagggttcttgaacctctgggcctggttgaggagcctgttaagacggctccgggaaaaaagaggccggtagagcactctcctgtggagccagactcctcctcgggaaccggaaaagcgggccagcagcctgcaagaaaaagattaaattttggtcagactggagacgcagactccgtacctgacccccagcctctcggacagccaccagcagccccctctggtctgggatctactacaatggctacaggcagtggcgcaccaatggcagacaataacgagggtgccgatggagtgggtaattcctcaggaaattggcattgcgattcccaatggctgggcgacagagtcatcaccaccagcacccgaacctgggccctgcccacatacaacaaccacctctacaagcaaatctccagccaatcaggagccagcaacgacaaccactactttggctacagcaccccctgggggtattttgacttcaacagattccactgccacttttcaccacgtgactggcaaagactcgtcaacaacaaccggggattccggcccaaaagactcaacttcaagctctttaatattcaagtcaaagaggtcacgcagaatgacggtacgacgacgattgccaataaccttaccagcacggttcaggtgtttactgactcggagtaccagctcccgtacgtcctgggctcggcgcatcaaggatgcctcccgccgtttccagcggacgtcttcatggtcccacagtatggatacctcaccctgaacaacgggagtcaggcggtaggacgctcttccttttactgcctggagtactttccttctcagatgctgcgtactggaaacaactttcagttcagctacacttttgaagacgtgcctttccacagcagctacgctcacagccagagtctggatcggctgatgaatcctctgatcgaccagtacctgtattatctgaacaagacacaaacaaatagtggaactcttcagcagtctcggctactgtttagccaagctggaccaaccaacatgtctcttcaagctaaaaactggctgcctggaccttgctacagacagcagcgtctgtcaaaacaggcaaacgacaacaacaacagcaactttccctggactgcagctacaaagtatcatctaaatggccgggactcgttggttaatccaggaccagctatggccagtcacaaggatgacgaagaaaagtttttccccatgcatggaaccctgatatttggtaaacaaggaacaaatgccaacgacgcggatttggaaaatgtcatgattacagatgaagaagaaatcagggccaccaatcccgtggctacggagcagtacgggactgtgtcaaataatttgcaaaactcaaacactggtccaactactggaactgtcaatcaccaaggagcgttacctggtatggtgtggcaggatcgagacgtgtacctgcagggacccatttgggccaagattcctcacaccgatggacactttcatccttctccactgatgggaggttttggactcaaacacccgcctcctcagatcatgatcaaaaacactcccgttccagccaatcctcccacaaacttcagttctgccaagtttgcttctttcatcacacagtattccacgggacaggtcagcgtggagatcgagtgggagctgcagaaggagaacagcaaacgctggaatcccgaaattcagtacacttccaactacaacaagtctgttaatgtggactttactgtggacactaatggtgtgtattcagagcctcgccccattggcaccagatacctgactcgtaatctgtaa

SEQ ID NO: 254 - protein, 735 aa, Adeno-associated virus
MAADGYLPDWLEDTLSEGIRQWWKLKPGPPPPKPAERHKDDSRGLVLPGYKYLGPFNGLDKGEPVNEADAAALEHDKAYDRQLDSGDNPYLKYNHADAEFQERLKEDTSFGGNLGRAVFQAKKRVLEPLGLVEEPVKTAPGKKRPVEHSPVEPDSSSGTGKAGQQPARKRLNFGQTGDADSVPDPQPLGQPPAAPSGLGSTTMATGSGAPMADNNEGADGVGNSSGNWHCDSQWLGDRVITTSTRTWALPTYNNHLYKQISSQSGASNDNHYFGYSTPWGYFDFNRFHCHFSPRDWQRLVNNNRGFRPKRLNFKLFNIQVKEVTQNDGTTTIANNLTSTVQVFTDSEYQLPYVLGSAHQGCLPPFPADVFMVPQYGYLTLNNGSQAVGRSSFYCLEYFPSQMLRTGNNFQFSYTFEDVPFHSSYAHSQSLDRLMNPLIDQYLYYLNKTQTNSGTLQQSRLLFSQAGPTNMSLQAKNWLPGPCYRQQRLSKQANDNNNSNFPWTAATKYHLNGRDSLVNPGPAMASHKDDEEKFFPMHGTLIFGKQGTNANDADLENVMITDEEEIRATNPVATEQYGTVSNNLQNSNTGPTTGTVNHQGALPGMVWQDRDVYLQGPIWAKIPHTDGHFHPSPLMGGFGLKHPPPQIMIKNTPVPANPPTNFSSAKFASFITQYSTGQVSVEIEWELQKENSKRWNPEIQYTSNYNKSVNVDFTVDTNGVYSEPRPIGTRYLTRNL

SEQ ID NO: 255 - protein, 738 aa, Adeno-associated virus
MAADGYLPDWLEDNLSEGIREWWDLKPGAPKPKANQQKQDDGRGLVLPGYKYLGPFNGLDKGEPVNAADAAALEHDKAYDQQLKAGDNPYLRYNHADAEFQERLQEDTSFGGNLGRAVFQAKKRVLEPLGLVEEAAKTAPGKKRPVEPSPQRSPDSSTGIGKKGQQPAKKRLSFGQTGDSESVPDPQPIGEPPAGPSGLGSGTMAAGGGAPMADNNEGADGVGSSSGNWHCDSTWLGDRVITTSTRTWALPTYNNHLYKQISNGTSGGSTNDNTYFGYSTPWGYFDFNRFHCHFSPRDWQRLINNNWGFRPKRLSFKLFNIQVKEVTQNEGTKTIANNLTSTIQVFTDSEYQLPYVLGSAHQGCLPPFPADVFMIPQYGYLTLNNGSQAVGRSSFYCLEYFPSQMLRTGNNSEFSYTFEDVPFHSSYAHSQSLDRLMNPLIDQYLYYLSRTQSTGGTQGTQQLLFSQAGPANMSAQAKNWLPGPCYRQQRVSTTLSQNNNSNFAWTGATKYHLNGRDSLVNPGVAMATHKDDEERFFPSSGVLMFGKQGAGRDNVDYSSVMLTSEEEIKTTNPVATEQYGVVADNLQQTNTGPIVGNVNSQGALPGMVWQNRDVYLQGPIWAKIPHTDGNFHPSPLMGGFGLKHPPPQILIKNTPVPADPPTTFSQAKLASFITQYSTGQVSVEIEWELQKENSKRWNPEIQYTSNYYKSTNVDFAVNTEGTYSEPRPIGTRYLTRNL

SEQ ID NO: 256 - DNA, 2217 bp, Adeno-associated virus
atggctgctgacggttatcttccagattggctcgaggacaacctctctgagggcattcgcgagtggtgggacctgaaacctggagcccccaagcccaaggccaaccagcagaagcaggacgacggccggggtctggtgcttcctggctacaagtacctcggacccttcaacggactcgacaagggggagcccgtcaacgcggcggacgcagcggccctcgagcacgacaaggcctacgaccagcagctcaaagcgggtgacaatccgtacctgcggtataaccacgccgacgccgagtttcaggagcgtctgcaagaagatacgtcttttgggggcaacctcgggcgagcagtcttccaggccaagaagcgggttctcgaacctctcggtctggttgaggaagctgctaagacggctcctggaaagaagagaccggtagaaccgtcacctcagcgttcccccgactcctccacgggcatcggcaagaaaggccagcagcccgctaaaaagagactgagctttggtcagactggcgactcagagtcagtccccgaccctcaaccaatcggagaaccaccagcaggcccctctggtctgggatctggtacaatggctgcaggcggtggcgctccaatggcagacaataacgaaggcgccgacggagtgggtagttcctcaggaaattggcattgcgattccacatggctgggcgacagagtcatcaccaccagcacccgaacctgggccctgcccacctacaacaaccacctctacaagcaaatatccaatgggacatcgggaggaagcaccaacgacaacacctacttcggctacagcaccccctgggggtattttgacttcaacagattccactgccacttctcaccacgtgactggcagcgactcatcaacaacaactggggattccggccaaaaagactcagcttcaagctcttcaacatccaggtcaaggaggtcacgcagaatgaaggcaccaagaccatcgccaataaccttaccagcacgattcaggtatttacggactcggaataccagctgccgtacgtcctcggctccgcgcaccagggctgcctgcctccgttcccggcggacgtcttcatgattccccagtacggctaccttacactgaacaatggaagtcaagccgtaggccgttcctccttctactgcctggaatattttccatctcaaatgctgcgaactggaaacaattctgaattcagctacaccttcgaggacgtgcctttccacagcagctacgcacacagccagagcttggaccgactgatgaatcctctcatcgaccagtacctgtactacttatccagaactcagtccacaggaggaactcaaggtacccagcaattgttattttctcaagctgggcctgcaaacatgtcggctcaggctaagaactggctacctggaccttgctaccggcagcagcgagtctctacgacactgtcgcaaaacaacaacagcaactttgcttggactggtgccaccaaatatcacctgaacggaagagactctttggtaaatcccggtgtcgccatggcaacccacaaggacgacgaggaacgcttcttcccgtcgagtggagtcctgatgtttggaaaacagggtgctggaagagacaatgtggactacagcagcgttatgctaaccagcgaagaagaaattaaaaccactaaccctgtagccacagaacaatacggtgtggtggctgacaacttgcagcaaaccaatacagggcctattgtgggaaatgtcaacagccaaggagccttacctggcatggtctggcagaaccgagacgtgtacctgcagggtcccatctgggccaagattcctcacacggacggcaacttccacccttcaccgctaatgggaggatttggactgaagcacccacctcctcagatcctgatcaagaacacgccggtacctgcggatcctccaacaacgttcagccaggcgaaattggcttccttcattacgcagtacagcaccggacaggtcagcgtggaaatcgagtgggagctgcagaaggagaacagcaaacgctggaacccagagattcagtacacttcaaactactacaaatctacaaatgtggactttgctgtcaatacagagggaacttattctgagcctcgccccattggtactcgttacctcacccgtaatctgtaa

SEQ ID NO: 257 - protein, 738 aa, Adeno-associated virus
MAADGYLPDWLEDNLSEGIREWWDLKPGAPKPKANQQKQDDGRGLVLPGYKYLGPFNGLDKGEPVNAADAAALEHDKAYDQQLKAGDNPYLRYNHADAEFQERLQEDTSFGGNLGRAVFQAKKRVLEPLGPVEEAAKTAPGKKRPVEPPPQRSPDSSTGIGKKGQQPAKKRLNFGQTGDSESVPDPQPIGEPPAGPSGLGSGTMAAGGGAPMADNNEGADGVGSSSGNWHCDSTWLGDRVITTSTRTWALPTYNNHLYKQISNGTSGGSTNDNTYFGYSTPWGYFDFNRFHCHFSPRDWQRLINNNWGFRPKRLSFKLFNIQVKEVTQNEGTKTVANNLTSTIQVFTDSEYQLPYVLGSAHQGCLPPFPADVFMIPQYGYLTLNNGSQAVGRSSFYCLEYFPSQMLRTGNNFEFSYTFEDVPFHSSYAHSQSLDRLMNPLIDQYLYYLSRTQSTGGTQGTQQLLFSQAGPANMSAQAKNWLPGPCYRQQRVSTTLSQNNNSNFAWTGATKYHLNGRDSLVNPGVAMATHKDDEERFFPSSGVLMFGKQGAGRDNVDYSSVMLTSEEEIKTTNPVATEQYGVVADNLQQTNTGPIVGNVNSQGALPGMVWQNRDVYLQGPIWAKIPHTDGNFHPSPLMGGFGLKHPPPQILIKNTPVPADPPTTFSQAKLASFITQYSTGQVSVEIEWELQKENSKRWNPEIQYTSNYYKSTNVDFAVNTEGTYSEPRPIGTRYLTRNL

SEQ ID NO: 258 - DNA, 2217 bp, Adeno-associated virus
atggctgctgacggttatcttccagattggctcgaggacaacctctctgagggcattcgcgagtggtgggacctgaaacctggagcccccaagcccaaggccaaccagcagaagcaggacgacggccggggtctggtgcttcctggctacaagtacctcggacccttcaacggactcgacaagggggagcccgtcaacgcggcggacgcagcggccctcgagcacgacaaggcctacgaccagcagctcaaagcgggtgacaatccgtacctgcggtataaccacgccgacgccgagtttcaggagcgtctacaagaagatacgtcttttgggggcaacctcgggcgagcagtcttccaggccaagaagcgggttctcgaacctctcggtccggttgaggaagctgctaagacggctcctggaaagaagagaccggtagaaccgccacctcagcgttcccccgactcctccacgggcatcggcaagaaaggccagcagcccgctaaaaagagactgaactttggtcagactggcgactcagagtcagtccccgaccctcaaccaatcggagaaccaccagcaggcccctctggtctgggatctggtacaatggctgcaggcggtggcgctccaatggcagacaataacgaaggcgccgacggagtgggtagttcctcaggaaattggcattgcgattccacatggctgggcgacagagtcatcaccaccagcacccgaacctgggccctgcccacctacaacaaccacctctacaagcaaatatccaatgggacatcgggaggaagcaccaacgacaacacctacttcggctacagcaccccctgggggtattttgacttcaacagattccactgccacttctcaccacgtgactggcagcgactcatcaacaacaactggggattccggccaaaaagactcagcttcaagctcttcaacatccaggtcaaggaggtcacgcagaatgaaggcaccaagaccgtcgccaataaccttaccagcacgattcaggtatttacggactcggaataccagctgccgtacgtcctcggctccgcgcaccagggctgcctgcctccgttcccggcggacgtcttcatgattccccagtacggctaccttacactgaacaatggaagtcaagccgtaggccgttcctccttctactgcctggaatattttccatctcaaatgctgcgaactggaaacaattttgaattcagctacaccttcgaggacgtgcctttccacagcagctacgcacacagccagagcttggaccgactgatgaatcctctcatcgaccagtacctgtactacttatccagaactcagtccacaggaggaactcaaggtacccagcaattgttattttctcaagctgggcctgcaaacatgtcggctcaggctaagaactggctacctggaccttgctaccggcagcagcgagtctctacgacactgtcgcaaaacaacaacagcaactttgcttggactggtgccaccaaatatcacctgaacggaagagactctttggtaaatcccggtgtcgccatggcaacccacaaggacgacgaggaacgcttcttcccgtcgagtggagtcctgatgtttggaaaacagggtgctggaagagacaatgtggactacagcagcgttatgctaaccagcgaagaagaaattaaaaccactaaccctgtagccacagaacaatacggtgtggtggctgacaacttgcagcaaaccaatacagggcctattgtgggaaatgtcaacagccaaggagccttacctggcatggtctggcagaaccgagacgtgtacctgcagggtcccatctgggccaagattcctcacacggacggcaacttccacccttcaccgctaatgggaggatttggactgaagcacccacctcctcagatcctgatcaagaacacgccggtacctgcggatcctccaacaacgttcagccaggcgaaattggcttccttcattacgcagtacagcaccggacaggtcagcgtggaaatcgagtgggagctgcagaaggagaacagcaaacgttggaacccagagattcagtacacttcaaactactacaaatctacaaatgtggactttgctgtcaatacagagggaacttattctgagcctcgccccattggtactcgttacctcacccgtaatctgtaa

SEQ ID NO: 259 - protein, 738 aa, Adeno-associated virus
MAADGYLPDWLEDNLSEGIREWWDLKPGAPKPKANQQKQDDGRGLVLPGYKYLGPFNGLDKGEPVNAADAAALEHDKAYDQQLKAGDNPYLRYNHADAEFQERLQEDTSFGGNLGRAVFQAKKRVLEPLGLVEEAAKTAPGKKRPVEPSPQRSPDSSTGIGKKGQQPAKKRLNFGQTGDSESVPDPQPIGEPPAGPSGLGSGTMAAGGGAPMADNNEGADGVGSSSGNWHCDSTWLGDRVITTSTRTWALPTYNNHLYKQISNGTSGGSTNDNTYFGYSTPWGYFDFNRFHCHFSPRDWQRLINNNWGFRPKRLSFKLFNIQVKEVTQNEGTKTIANNLTSTIQVFTDSEYQLPYVLGSAHQGCLPPFPADVFMIPQYGYLTLNNGSQAVGRSSFYCLEYFPSQMLRTGNNFEFSYTFEDVPFHSSYAHSQSLDRLMNPLIDQYLYYLSRTQSTGGTQGTQQLLFSQAGPANMSAQAKNWLPGPCYRQQRVSTTLSQSNNSNFAWTGATKYHLNGRDSLVNPGVAMATHKDDEERFFPSSGVLMFGKQGAGRDNVDYSSVMLTSEEEIKTTNPVATEQYGVVADNLQQTNTGPIVGNVNSQGALPGMVWQNRDVYLQGPIWAKIPHTDGNFHPSPLMGGLGLKHPPPQILIKNTPVPADPPTTFSQAKLASFITQYSTGQVSVEIEWELQKENSKRWNPEIQYTSNYYKSTNVDFAVNTEGTYSEPRPIGTRYLTRNL

SEQ ID NO: 260 - DNA, 2217 bp, Adeno-associated virus
atggctgctgacggttatcttccagattggctcgaggacaacctctctgagggcattcgcgagtggtgggacctgaaacctggagcccccaagcccaaggccaaccagcagaagcaggacgacggccggggtctggtgcttcctggctacaagtacctcggacccttcaacggactcgacaagggggagcccgtcaacgcggcggacgcagcggccctcgagcacgacaaggcctacgaccagcagctcaaagcgggtgacaatccgtacctgcggtataaccacgccgacgccgagtttcaggagcgtctgcaagaagatacgtcttttgggggcaacctcgggcgagcagtcttccaggccaagaagcgggttctcgaacctctcggtctggttgaggaagcggctaagacggctcctggaaagaagagaccggtagaaccgtcacctcagcgttcccccgactcctccacgggcatcggcaagaaaggccagcagcccgctaaaaagagactgaactttggtcagactggcgactcagagtcagtccccgaccctcaaccaatcggagaaccaccagcaggcccctctggtctgggatctggtacaatggctgcaggcggtggcgctccaatggcagacaataacgaaggcgccgacggagtgggtagttcctcaggaaattggcattgcgattccacatggctgggcgacagagtcatcaccaccagcacccgaacctgggccctgcccacctacaacaaccacctctacaagcaaatatccaatgggacatcgggaggaagcaccaacgacaacacctacttcggctacagcaccccctgggggtattttgacttcaacagattccactgccacttctcaccacgtgactggcagcgactcatcaacaacaactggggattccggccaaaaagactcagcttcaagctcttcaacatccaggtcaaggaggtcacgcagaatgaaggcaccaagaccatcgccaataaccttaccagcacgattcaggtatttacggactcggaataccagctgccgtacgtcctcggctccgcgcaccagggctgcctgcctccgttcccggcggacgtcttcatgattccccagtacggctaccttacactgaacaatggaagtcaagccgtaggccgttcctccttctactgcctggaatattttccatctcaaatgctgcgaactggaaacaattttgaattcagctacaccttcgaggacgtgcctttccacagcagctacgcacacagccagagcttggaccgactgatgaatcctctcatcgaccagtacctgtactacttatccagaactcagtccacaggaggaactcaaggtacccagcaattgttattttctcaagctgggcctgcaaacatgtcggctcaggctaagaactggctacctggaccttgctaccggcagcagcgagtctctacgacactgtcgcaaagcaacaacagcaactttgcttggactggtgccaccaaatatcacctgaacggaagagactctttggtaaatcccggtgtcgccatggcaacccacaaggacgacgaggaacgcttcttcccgtcgagtggagtcctgatgtttggaaaacagggtgctggaagagacaatgtggactacagcagcgttatgctaaccagcgaagaagaaattaaaaccactaaccctgtagccacagaacaatacggtgtggtggctgacaacttgcagcaaaccaatacagggcctattgtgggaaatgtcaacagccaaggagccttacctggcatggtctggcagaaccgagacgtgtacctgcagggtcccatctgggccaagattcctcacacggacggcaacttccacccttcaccgctaatgggaggacttggactgaagcacccacctcctcagatcctgatcaagaacacgccggtacctgcggatcctccaacaacgttcagccaggcgaaattggcttccttcattacgcagtacagcaccggacaggtcagcgtggaaatcgagtgggagctgcagaaggagaacagcaaacgctggaacccagagattcagtacacttcaaactactacaaatctacaaatgtggactttgctgtcaatacagagggaacttattctgagcctcgccccattggtactcgttacctcacccgtaatctgtaa

SEQ ID NO: 261 - protein, 737 aa, Adeno-associated virus
MAADGYLPDWLEDNLSEGIREWWDLKPGAPKPKANQQKQDDGRGLVLPGYKYLGPFNGLDKGEPVNAADAAALEHDKAYDQQLKAGDNPYPRYNHADAEFQERLQEDTPFGGNLGRAVFQAKKRVLEPLGLVEEAAKTAPGKKRPVEPSPQRSPDSSTGIGKKGQQPAKKRLNFGQTGDSESVPDPQPIGEPPAGPSGLGSGTMAAGGGAPMADNNEGADGVGNASGNWHCDSTWLGDRVITTSTRTWALPTYNNHLYKQISSASTGASNDNHYFGYSTPWGYFDFNRFHCHFSPRDWQRLINNNWGFRPKRLNFKLFNIQVKEVTTNDGVTTIANNLTSTVQVFSDSEYQLPYVLGSAHQGCLPPFPADVFMIPQYGYLTLNNGSQAVGRSSFYCLEYFPSQMLRTGNNFTFSYTFEEVPLHSSYAHSQSLDRLMNPLIVQYLYYLNRTQNQSGSAQNKDLLFSRGSPAGMSVQPKNWLPGPCYRQQRVSKTKTDNNNSNFTWTGASKYNLNGRESIINPGTAMASHKDDEDKFFPMSGVMIFGKESAGASNTALDNVMITDEEEIKATNPVATERFGTVAVNFQSSSTDPATGDVHAMGALPGMVWQDRDVYLQGPIWAKIPHTDGHFHPSPLMGGFGLKNPPPQILIKNTPVPANPPAEFSATKFASFITQYSTGQVSVEIEWELQKENSKRWNPEVQYTSNYAKSASVDFTVDNNGLYTEPRPIGTRYLTRPL

SEQ ID NO: 262 - protein, 737 aa, Adeno-associated virus
MAADGYLPDWLEDNLSEGIREWWDLKPGAPKPKANQQKQDDGRGLVLPGYKYLGPFNGLDKGEPVNAADAAALEHDKAYDQQLKAGDNPYPRYNHADAEFQERLQEDTSFGGNLGRAVFQAKKRVLEPLGLVEEAAKTAPGKKRPVEPSPQRSPDSSTGIGKKGQQPAKKRLNFGQTGDSESVPDPQPIGEPPAGPSGLGSGTMAAGGGAPMADNNEGADGVGNASGNWHCDSTWLGDRVITTSTRTWALPTYNNHLYKQISSASTGASNDNHYFGYSTPWGYFDFNRFHCHFSPRDWQRLINNNWGFRPKRLNFKLFNIQVKEVTTNDGVTTIANNLTSTVQVFSDSEYQLPYVLGSAHQGCLPPFPADVFMIPQYGYLTLNNGSQAVGRSSFYCLEYFPSQMLRTGNNFTFSYTFEEVPLHSSYAHSQSLDRLMNPLIDQYLYYLNRTQNQSGSAQNKDLLFSRGSPAGMSVQPKNWLPGPCYRQQRVSKTKTDNNNSNFTWTGASKYNLNGRESIINPGTAMASHKDDEDKFFPMSGVMIFGKESAGASNTALDNVMITDEEEIKATNPVATERFGTVAVNFQSSSTDPATGDVHAMGALPGMVWQDRDVYLQGPIWAKIPHTDGHFHPSPLMGGFGLKNPPPQILIKNTPVPANPPAEFSATKFASFITQYSTGQVSVEIEWELQKENSKRWNPEVQYTSNYAKSASVDFTVDNNGLYTEPRPIGTRYLTRPL

SEQ ID NO: 263 - DNA, 2214 bp, Adeno-associated virus
atggctgctgacggttatcttccagattggctcgaggacaacctctctgagggcattcgcgagtggtgggacctgaaacctggagcccccaagcccaaggccaaccagcagaagcaggacgacggccggggtctggtgcttcctggctacaagtacctcggacccttcaacggactcgacaagggggagcccgtcaacgcggcggacgcagcggccctcgagcacgacaaggcctacgaccagcagctcaaagcgggtgacaatccgtacccgcggtataaccacgccgacgccgagtttcaggagcgtctgcaagaagatacgccttttgggggcaacctcgggcgagcagtcttccaggccaagaagcgggttctcgaacctctcggtctggttgaggaagctgctaagacggctcctggaaagaagagaccggtagaaccgtcacctcagcgttcccccgactcctccacgggcatcggcaagaaaggccagcagcccgctaaaaagagactgaactttggtcagactggcgactcagagtcagtccccgaccctcaaccaatcggagaaccaccagcaggcccctctggtctgggatctggtacaatggctgcaggcggtggcgctccaatggcagacaataacgaaggcgccgacggagtgggtaatgcctcaggaaattggcattgcgattccacatggctgggcgacagagtcatcaccaccagcacccgcacctgggccttgcccacctacaataaccacctctacaagcaaatctccagtgcttcaacgggggccagcaacgacaaccactacttcggctacagcaccccctgggggtattttgatttcaacagattccactgccacttttcaccacgtgactggcagcgactcatcaacaacaattggggattccggcccaagagactcaacttcaaactcttcaacatccaagtcaaggaggtcacgacgaatgatggcgtcacaaccatcgctaataaccttaccagcacggttcaagtcttctcggactcggagtaccagcttccgtacgtcctcggctctgcgcaccagggctgcctccctccgttcccggcggacgtgttcatgattccgcaatacggctacctgacgctcaacaatggcagccaagccgtgggacgttcatccttttactgcctggaatatttcccttctcagatgctgagaacgggcaacaactttaccttcagctacacctttgaggaagtgcctctccacagcagctacgcgcacagccagagcctggaccggctgatgaatcctctcatcgtccaatacctgtattacctgaacagaactcaaaatcagtccggaagtgcccaaaacaaggacttgctgttcagccgtgggtctccagctggcatgtctgttcagcccaaaaactggctacctggaccctgttatcggcagcagcgcgtttctaaaacaaaaacagacaacaacaacagcaattttacctggactggtgcttcaaaatataacctcaatgggcgtgaatccatcatcaaccctggcactgctatggcctcacacaaagacgacgaagacaagttctttcccatgagcggtgtcatgatttttggaaaagagagcgccggagcttcaaacactgcattggacaatgtcatgattacagacgaagaggaaattaaagccactaaccctgtggccaccgaaagatttgggaccgtggcagtcaatttccagagcagcagcacagaccctgcgaccggagatgtgcatgctatgggagcattacctggcatggtgtggcaagatagagacgtgtacctgcagggtcccatttgggccaaaattcctcacacagatggacactttcacccgtctcctcttatgggcggctttggactcaagaacccgcctcctcagatcctcatcaaaaacacgcctgttcctgcgaatcctccggcggagttttcagctacaaagtttgcttcattcatcacccaatactccacaggacaagtgagtgtggaaattgaatgggagctgcagaaagaaaacagcaagcgctggaatcccgaagtgcagtacacatccaattatgcaaaatctgccagcgttgattttactgtggacaacaatggactttatactgagcctcgccccattggcacccgttaccttacccgtcccctgtaa

SEQ ID NO: 264 - protein, 736 aa, Adeno-associated virus
MAADGYLPDWLEDTLSEGIRQWWKLRPGPPPPKPAERHKDDSRGLVLPGYKYLGPFNGLDKGEPVNEADAAALEHDKAYDRQLDSGDNPYLKYNHADAEFQERLKEDTSFGGNLGRAVFQAKKRVLEPLGLVEEGAETAPGKKRPVEQSPQGPDSSSGIGKTGQQPAKKRLNFGQTGDSESVPDPQPLGEPPATPAAVGPTTMASGGGAPMADNNEGADGVGNASGNWHCDSTWLGDRVITTSTRTWALPTYNNHLYKQISSASTGASNDNHYFGYSTPWGYFDFNRFHCHFSPRDWQRLINNNWGFRPKRLNFKLFNIQVKEVTTNDGVTTIANNLTSTVQVFSDSEYQLPYVLGSAHQGCLPPFPADVFMIPQYGYLTLNNGSQAVGRSSFYCLEYFPSQMLRTGNNFTFSYTFEEVPFHSSYAHSQSLDRLMNPLIDQYLYYPNRTQNQSGSAQNKDLLFSRGSPAGMSVQPKNWLPGPCYRQQRVSKTKTDNNNSNFTWTGASKYNLNGRESIINPGTAMASHKDDEDKFFPMSGVMIFGKESAGASNTALDNVMITDEEEIKATNPVATERFGTVAVNFQSSSTDPATGDVHAMGALPGMVWQGRDVYLQGPIWAKIPHTDGHFHPSPLMGGFGLKNPPPQILIKNTPVPANPPAEFSATKFASFITQYSTGQVSVEIEWELQKENSKRWNPEVQYTSNYAKSANVDFTVDNNGLYTEPRPIGTRYLTRPL

SEQ ID NO: 265 - DNA, 2211 bp, Adeno-associated virus
atggctgccgatggttatcttccagattggctcgaggacactctctctgaaggaataagacagtggtggaagctcagacctggcccaccaccaccaaagcccgcagagcggcataaggacgacagcaggggtcttgtgcttcctgggtacaagtacctcggacccttcaacggactcgacaagggagagccggtcaacgaggcagacgccgcggccctcgagcacgacaaagcctacgaccggcagctcgacagcggagacaacccgtacctcaagtacaaccacgccgacgcggagtttcaggagcgccttaaagaagatacgtcttttgggggcaacctcgggcgagcagtcttccaggccaagaagcgggttctcgaacctctcggtctggttgaggaaggcgctgagacggctcctggaaagaaacgtccggtagagcagtcgccacaagggccagactcctcctcgggcatcggcaagacaggccagcagcccgctaaaaagagactcaattttggtcagactggcgactcagagtcagtccccgatccacaacctctcggagaacctccagcaacccccgctgctgtgggacctactacaatggcttcaggcggtggcgcaccaatggcagacaataacgaaggcgccgacggagtgggtaatgcctcaggaaattggcattgcgattccacatggctgggcgacagagtcatcaccaccagcacccgcacctgggccttgcccacctacaataaccacctctacaagcaaatctccagtgcttcaacgggggccagcaacgacaaccactacttcggctacagcaccccctgggggtattttgatttcaacagattccactgccacttttcaccacgtgactggcagcgactcatcaacaacaattggggattccggcccaagagactcaacttcaaactcttcaacatccaagtcaaggaggtcacgacgaatgatggcgtcacaaccatcgctaataaccttaccagcacggttcaagtcttctcggactcggagtaccagcttccgtacgtcctcggctctgcgcaccagggctgcctccctccgttcccggcggacgtgttcatgattccgcaatacggctacctgacgctcaacaatggcagccaagccgtgggacgttcatccttttactgcctggaatatttcccttctcagatgctgagaacgggcaacaactttaccttcagctacacctttgaggaagtgcctttccacagcagctacgcgcacagccagagcctggaccggctgatgaatcctctcatcgaccaatacctgtattacccgaacagaactcaaaatcagtccggaagtgcccaaaacaaggacttgctgtttagccgtgggtctccagctggcatgtctgttcagcccaaaaactggctacctggaccctgttatcggcagcagcgcgtttctaaaacaaaaacagacaacaacaacagcaattttacctggactggtgcttcaaaatataacctcaatgggcgtgaatccatcatcaaccctggcactgctatggcctcacacaaagacgacgaagacaagttctttcccatgagcggtgtcatgatttttggaaaagagagcgccggagcttcaaacactgcattggacaatgtcatgattacagacgaagaggaaattaaagccactaaccctgtggccaccgaaagatttgggaccgtggcagtcaatttccagagcagcagcacagaccctgcgaccggagatgtgcatgctatgggagcattacctggcatggtgtggcaaggtagagacgtgtacctgcagggtcccatttgggccaaaattcctcacacagatggacactttcacccgtctcctcttatgggcggctttggactcaagaacccgcctcctcagatcctcatcaaaaacacgcctgttcctgcgaatcctccggcggagttttcagctacaaagtttgcttcattcatcacccaatactccacaggacaagtgagtgtggaaattgaatgggagctgcagaaagaaaacagcaagcgctggaatcccgaagtgcagtacacatccaattatgcaaaatctgccaacgttgattttactgtggacaacaatggactttatactgagcctcgccccattggcacccgttaccttacccgtcccctgtaa

SEQ ID NO: 266 - protein, 736 aa, Adeno-associated virus
MAADGYLPDWLEDTLSEGIRQWWKLRPGPPPPKPAERHKDDSRGLVLPGYKYLGPFNGLDKGEPVNEADAAALEHDKAYDRQLDSGDNPYLKYNHADAEFQERLKEDTSFGGNLGRAVFQAKKRVLEPLGLVEEGAKTAPGKKRPVEQSPQGPDSSSGIGKTGQQPAKKRLNFGQTGDSESVPDPQPLGEPPATPAAVGPTTMASGGGAPMADNNEGADGVGNASGNWHCDSTWLGDRVITTSTRTWALPTYNNHLYKQISSASTGASNDNHYFGYSTPWGYFDFNRFHCHFSPRDWQRLINNNWGFRPKRLNFKLFNIQVKEVTTNDGVTTIANNLTSTVQVFSDSEYQLPYVLGSAHQGCLPPFPADVFMIPQYGYLTLNNGSQAVGRSSFYCLEYFPSQMLRTGNNFTFSYTFEEVPFHSSYAHSQSLDRLMNPLIDQYLYYPNRTQNQSGSAQNKDLLFSRGSPAGMSVQPKNWLPGPCYRQQRVSKTKTDNNNSNFTWTGASKYNLNGRESIINPGTAMASHKDDEDKFFPMSGVMIFGKESAGASNTALDNVMITDEEEIKATNPVATERFGTVAVNFQSSSTDPATGDVHAMGALPGMVWQGRDVYLQGPIWAKIPHTDGHFHPSPLMGGFGLKNPPPQILIKNTPVPANPPAEFSATKFASFITQYSTGQVSVEIEWELQKENSKRWNPEVQYTSNYAKSANVDFTVDNNGLYTEPRPIGTRYLTRPL

SEQ ID NO: 267 - protein, 736 aa, Adeno-associated virus
MAADGYLPDWLEDTLSEGIRQWWKLRPGPPPPKPAERHKDDSRGLVLPGYKYLGPFNGLDKGEPVNEADAAALEHDKAYDRQLDSGDNPYLKYNHADAEFQERLKEDTSFGGNLGRAVFQAKKRVLEPLGLVEEGAKTAPGKKRPVEQSPQGPDSSSGIGKTGQQPAKKRLNFGQTGDSESVPDPQPLGEPPATPAAVGPTTMASGGGAPMADNNEGADGVGNASGNWHCDSTWLGDRVITTSTRTWALPTYNNHLYKQISSASTGASNDNHYFGYSTPWGYFDFNRFHCHFSPRDWQRLINNNWGFRPKRLNFKLFNIQVKEVTTNDGVTTIANNLTSTVQVFSDSEYQLPYVLGSAHQGCLPPFPADVFMIPQYGYLTLNNGSQAVGRSSFYCLEYFPSQMLRTGNNFTFSYTFEEVPFHSSYAHSQSLDRLMNPLIDQYLYYLNRTQNQSGSAQNKDLLFSRGSPAGMSVQPKNWLPGPCYRQQRVSKTKTDNNNSNFTWTGASKYNLNGRESIINPGTAMASHKDDEDKFFPMSGVMIFGKESAGASNTALDNVMITDEEEIKATNPVATERFGTVAVNFQSSSTDPATGDVHAMGALPGMVWQGRDVYLQGPIWAKIPHTDGHFHPSPLMGGFGLKNPPPQILIKNTPVPANPPAEFSATKFASFITQYSTGQVSVEIEWELQKENSKRWNPEVQYTSNYAKSANVDFTVDNNGLYTEPRPIGTRYLTRPL

SEQ ID NO: 268 - protein, 736 aa, Adeno-associated virus
MAADGYLPDWLEDTLSEGIRQWWKLRPGPPPPKPAERHKDDSRGLVLPGYKYLGPFNGLDKGEPVNEADAAALEHDKAYDRQLDSGDNPYLKYNHADAEFQERLKEDTSFGGNLGRAVFQAKKRVLEPLGLVEEGAKTAPGKKRPVEQSPQGPDSSSGIGKTGQQPAKKRLNFGQTGDSESVPDPQPLGEPPATPAAVGPTTMASGGGAPMADNNEGADGVGNASGNWHCDSTWLGDRVITTSTRTWALPTYNNHLYKQISSASTGASNDNHYFGYSTPWGYFDFNRFHCHFSPRDWQRLINNNWGFRPKRLNFKLFNIQVKEVTTNDGVTTIANNLTSTVQVFSDSEYQLPYVLGSAHQGCLPPFPADVFMIPQYGYLTLNNGSQAVGRSSFYCLEYFPSQMLRTGNNFTFSYTFEEVPFHSSYAHSQSLDRLMNPLIDQYLYYLNRTQNQSGSAQNKDLLFSRGSPAGMSVQPKNWLPGPCYRQQRVSKTKTDNNNSNFTWTGASKYNLNGRESIINPGTAMASHKDDEDKFFPMSGVMIFGKESAGASNTALDNVMITDEEEIKATNPVATERFGTVAVNFQSSSTDPATGDVHAMGALPGMVWQDRDVYLQGPIWAKIPHTDGHFHPSPLMGGFGLKNPPPQILIKNTPVPANPPAEFSATKFASFITQYSTGQVSVEIEWELQKENSKRWNPEVQYTSNYAKSANVDFTVDNNGLYTEPRPIGTRYLTRPL

SEQ ID NO: 269 - DNA, 2208 bp, Adeno-associated virus
atggctgccgatggctatcttccagattggctcgaggacactctctctgaaggaataagacagtggtggaagctcaaacctggcccaccaccaccaaagcccgcagagcggcatagggacgacagcaggggtcttgtgcttcctgggtacaagtacctcggacccttcaacggactcgacaagggagagccggtcaacgaggcagacgccgcggccctcgagcacgacaaagcctacgaccggcagctcgacagcggagacaacccgtacctcaagtacaaccacgccgacgcggagtttcaggagcgccttaaagaagatacgtcttttgggggcaacctcggacgagcagtcttccaggcgaaaaagagggttcttgaacctctgggcctggttgaggaacctgttaagacggctccgggaaaaaagaggccggtagagcactctcctgtggagccagactcctcctcgggaaccggaaaggcgggccagcagcctgcaagaaaaagattgaattttggtcagactggagacgcagactcagtacctgacccccagcctctcggacagccaccagcagccccctctggtctgggaactaatacgatggctacaggcagtggcgcaccaatggcagacaataacgagggcgccgacggagtgggtaattcctcgggaaattggcattgcgattccacatggatgggcgacagagtcatcaccaccagcacccgaacctgggccctgcccacctacaacaaccacctctacaaacaaatttccagccaatcaggagcctcgaacgacaatcactactttggctacagcaccccttgggggtattttgacttcaacagattccactgccacttttcaccacgtgactggcaaagactcatcaacaacaactggggattccgacccaagagactcaacttcaagctctttaacattcaagtcaaagaggtcacgcagaatgacggtacgacgacgattgccaataaccttaccagcacggttcaggtgtttactgactcggggtaccagctcccgtacgtcctcggctcggcgcatcaaggatgcctcccgccgttcccagcagacgtcttcatggtgccacagtatggataccccaccctgaacaacgggagtcaggcagtaggacgctcttcattttactgcctggagtactttccttctcagatgctgcgtaccggaaacaactttaccttcagctacacttttgaggacgttcctttccacagcagctacgctcacagccagagtctggaccgtctcatgaatcctctcatcgaccagtacctgtattacttgagcacaacaaacactccaagtggaaccaccacgcagtcaaggcttcagttttctcaggccggagcgagtgacattcgggaccagtctaggaactggcttcctggaccctgttaccgccagcagcgagtatcaaagacatctgcggataacaacaacagtgaatactcgtggactggagctaccaagtaccacctcaatggcagagactctctggtgaatccgggcccggccgtggcaagccacaaggacgatgaagaaaagttttttcctcagagcggggttctcatctttgggaagcaaggctcagagaaaacaaatgtggacattgaaaaggtcatgattacagacgaagaggaaatcaggacaaccaatcccgtggctacggagcagtatggttctgtatctaccaacctccagagaggcaacagacaagcagctaccgcagatgtcaacacacaaggcgttcttccaggcatggtctggcaggacagagatgtgtaccttcaggggcccatctgggcaaagattccacacacggacggacattttcacccctctcccctcatgggtggattcggacttaaacaccctcctccacagattctcatcaagaacaccccggtacctgcgaatccttcgaccaccttcagtgcggcaaagtttgcttccttcatcacacagtactccacgggacaggtcagcgtggagatcgagtgggagctgcagaaggaaaacagcaaacgctggaatcccgaaattcagtacacttccaactacaacaagtctgttaatgtggactttactgtggacactaatggcgtgtattcagagcctcgccccattggcaccagatacctgactcgtaatctgtaa

SEQ ID NO: 270 - protein, 735 aa, Adeno-associated virus
MAADGYLPDWLEDTLSEGIRQWWKLKPGPPPPKPAERHRDDSRGLVLPGYKYLGPFNGLDKGEPVNEADAAALEHDKAYDRQLDSGDNPYLKYNHADAEFQERLKEDTSFGGNLGRAVFQAKKRVLEPLGLVEEPVKTAPGKKRPVEHSPVEPDSSSGTGKAGQQPARKRLNFGQTGDADSVPDPQPLGQPPAAPSGLGTNTMATGSGAPMADNNEGADGVGNSSGNWHCDSTWMGDRVITTSTRTWALPTYNNHLYKQISSQSGASNDNHYFGYSTPWGYFDFNRFHCHFSPRDWQRLINNNWGFRPKRLNFKLFNIQVKEVTQNDGTTTIANNLTSTVQVFTDSGYQLPYVLGSAHQGCLPPFPADVFMVPQYGYPTLNNGSQAVGRSSFYCLEYFPSQMLRTGNNFTFSYTFEDVPFHSSYAHSQSLDRLMNPLIDQYLYYLSTTNTPSGTTTQSRLQFSQAGASDIRDQSRNWLPGPCYRQQRVSKTSADNNNSEYSWTGATKYHLNGRDSLVNPGPAVASHKDDEEKFFPQSGVLIFGKQGSEKTNVDIEKVMITDEEEIRTTNPVATEQYGSVSTNLQRGNRQAATADVNTQGVLPGMVWQDRDVYLQGPIWAKIPHTDGHFHPSPLMGGFGLKHPPPQILIKNTPVPANPSTTFSAAKFASFITQYSTGQVSVEIEWELQKENSKRWNPEIQYTSNYNKSVNVDFTVDTNGVYSEPRPIGTRYLTRNL

SEQ ID NO: 271 - DNA, 2211 bp, Adeno-associated virus
atggctgccgacggttatcttccagattggctcgaggacactctctctgaaggaataagacagtggtggaagctcaaacctggcccaccaccaccaaagcccgcagagcggcataaggacgacagcaggggtcttgtgcttcctgggtacaagtacctcggacccttcaacggactcgacaagggagagccggtcaacgaggcagacgccgcggccctcgagcacgacaaagcctacgaccggcagctcgacagcggagacaacccgtacctcaagtacaaccacgccgacgcggagtttcaggagcgccttaaagaagatacgtcttttgggggcaacctcgggcgggcagtcttccaggccaagaagcgggttctcgaacctctcggtctggttgaggaaggcgctaagacggctcctggaaagaaacgtccggtagagcagtcgccacaagagccagactccccctcgggcatcggcaagacaggccagcagcccgctaaaaagagactcaattttggtcagactggcgactcagagtcagtccccgatccacaacctctcggagaacctccagcaacccccgctgctgtgggacctactacaatggcttcaggcggtggcgcaccaatggcagacaataacgaaggcgccgacggagtgggtaatgcctcaggaaattggcactgcgattccacatggctgggcgacagagtcatcaccaccagcacccgcacctgggccttgcccacctacaataaccacctctacaagcaaatctccagtgcttcaacgggggccagcaacgacaaccactacttcggctacagcaccccctgggggtattttgatttcaacagattccactgccacttttcaccacgtgactggcagcgactcatcaacaacaattggggattccggcccaagagactcaacttcaaactcttcaacatccaagtcaaggaggtcacgacgaatgatggcgtcacaaccatcgctaataaccttaccagcacggttcaagtcttctcggactcggagtaccagcttccgtacgtcctcggctctgcgcaccagggccgcctccctccgttcccggcggacgtgttcatgattccgcaatacggctacctgacgctcaacaatggcagccaagccgtgggacgttcatcctcttactgcctggaatatttcccttctcagatgctgagaacgggcaacaactttaccttcagctacacctttgaggaagtgcctctccacagcagctgcgcgcacagccagagcctggaccggctgatgaatcctctcatcgaccaatacctgtattacctgaacagaactcaaaatcagtccggaagtgcccaaaacagggacttgctgttcagccgtgggtctccagctggcatgtctgttcagcccaaaaactggctacctggaccctgttatcggcagcagcgcgtttctaaaacaaaaacagacaacaacaacagcaattttacctggactggtgcttcaaaatataacctcaatgggcgtgaatccatcatcaaccctggcactgctatggcctcacacaaagacgacgaagacaagttctttcccatgagcggtgtcatgatttttggaaaagagagcgccggagcttcaaacactgcattggacaatgtcatgattacagacgaagaggaaattaaagccactaaccctgtggccaccgaaagatttgggaccgtggcagtcaatttccagagcagcagcacagaccctgcgaccggagatgtgcatgctatgggagcattacctggcatggtgtggcaagatagagacgtgtacctgcagggtcccatttgggccaaaattcctcacacagatggacactttcacccgtctcctcttatgggcggctttggactcaagaacccgcctcctcagatcctcatcaaaaacacgcctgttcctgcgaatcctccggcggagttttcagctacaaagtttgcttcattcatcacccaatactccgcaggacaagtgagtgtggaaattgaatgggagctgcagaaagaaaacagcaagcgctggaatcccgaagtgcagtacacatccaattatgcaaaatctgccaacgttgattttactgtggacaacaatggactttatactgagcctcgccccattggcacccgttaccttacccgtcccctgtaa

SEQ ID NO: 272 - protein, 736 aa, Adeno-associated virus
MAADGYLPDWLEDTLSEGIRQWWKLKPGPPPPKPAERHKDDSRGLVLPGYKYLGPFNGLDKGEPVNEADAAALEHDKAYDRQLDSGDNPYLKYNHADAEFQERLKEDTSFGGNLGRAVFQAKKRVLEPLGLVEEGAKTAPGKKRPVEQSPQEPDSPSGIGKTGQQPAKKRLNFGQTGDSESVPDPQPLGEPPATPAAVGPTTMASGGGAPMADNNEGADGVGNASGNWHCDSTWLGDRVITTSTRTWALPTYNNHLYKQISSASTGASNDNHYFGYSTPWGYFDFNRFHCHFSPRDWQRLINNNWGFRPKRLNFKLFNIQVKEVTTNDGVTTIANNLTSTVQVFSDSEYQLPYVLGSAHQGRLPPFPADVFMIPQYGYLTLNNGSQAVGRSSSYCLEYFPSQMLRTGNNFTFSYTFEEVPLHSSCAHSQSLDRLMNPLIDQYLYYLNRTQNQSGSAQNRDLLFSRGSPAGMSVQPKNWLPGPCYRQQRVSKTKTDNNNSNFTWTGASKYNLNGRESIINPGTAMASHKDDEDKFFPMSGVMIFGKESAGASNTALDNVMITDEEEIKATNPVATERFGTVAVNFQSSSTDPATGDVHAMGALPGMVWQDRDVYLQGPIWAKIPHTDGHFHPSPLMGGFGLKNPPPQILIKNTPVPANPPAEFSATKFASFITQYSAGQVSVEIEWELQKENSKRWNPEVQYTSNYAKSANVDFTVDNNGLYTEPRPIGTRYLTRPL

SEQ ID NO: 273 - protein, 736 aa, Adeno-associated virus
MAADGYLPDWLEDTLSEGIRQWWKLKPGPPPPKPAERHKDDSRGLVLPGYKYLGPFNGLDKGEPVNEADAAALEHDKAYDRQLDSGDNPYLKYNHADAEFQERLKEDTSFGGNLGRAVFQAKKRVLEPLGLVEEGAKTAPGKKRPVEQSPQEPDSSSGIGKTGQQPAKKRLNFGQTGDSESVPDPQPLGEPPATPAAVGPTTMASGGGAPMADNNEGADGVGNASGNWHCDSTWLGDRVITTSTRTWALPTYNNHLYKQISSASTGASNDNHYFGYSTPWGYFDFNRFHCHFSPRDWQRLINNNWGFRPKRLNFKLFNIQVKEVTTNDGVTTIANNLTSTVQVFSDSEYQLPYVLGSAHQGCLPPFPADVFMIPQYGYLTLNNGSQAVGRSSFYCLEYFPSQMLRTGNNFTFSYTFEEVPLHSSCAHSQSLDRLMNPLIDQYLYYLNRTQNQSGSAQNRDLLFSRGSPAGMSVQPKNWLPGPCYRQQRVSKTKTDNNNSNFTWTGASKYNLNGRESIINPGTAMASHKDDEDKFFPMSGVMIFGKESAGASNTALDNVMITDEEEIKATNPVATERFGTVAVNFQSSSTDPATGDVHAMGALPGMVWQDRDVYLQGPIWAKIPHTDGHFHPSPLMGGFGLKNPPPQILIKNTPVPANPPAEFSATKFASFITQYSTGQVSVEIEWELQKENSKRWNPEVQYTSNYAKSANVDFTVDNNGLYTEPRPIGTRYLTRPL

SEQ ID NO: 274 - DNA, 2208 bp, Adeno-associated virus
atggctgccgatggctatcttccagattggctcgaggacactctctctgaaggaataagacagtggtggaagctcaaacctggcccaccaccaccaaagcccgcagagcggcatagggacgacagcaggggtcttgtgcttcctgggtacaagtacctcggacccttcaacggactcgacaagggagagccggtcaacgaggcagacgccgcggccctcgagcacgacaaagcctacgaccggcagctcgacagcggagacaacccgtacctcaagtacaaccacgccgacgcggagtttcaggagcgccttaaagaagatacgtcttttgggggcaacctcggacgagcagtcttccaggcgaaaaagagggttcttgaacctctgggcctggttggggaacctgttaagacggctccgggaaaaaagaggccggtagagcactctcctgtggagccagactcctcctcgggaaccggaaaggcgggccagcagcctgcaagaaaaagattgaattttggtcagactggagacgcagactcagtacctgacccccagcctctcggacagccaccagcagccccctctggtctgggaactaatacgatggctacaggcagtggcgcaccaatggcagacaataacgagggcgccgacggagtgggtaattcctcgggaaattggcattgcgattccacatggatgggcgacagagtcatcaccaccagcacccgaacctgggccctgcccacctacaacaaccacctctacaaacaaatttccagccaatcaggagcctcgaacgacagtcactactttggctacagcaccccttgggggtattttgacttcaacagattccactgccacttttcaccacgtgactggcaaagactcatcaacaacaactggggattccgacccaagagactcaacttcaagctctttaacattcaagtcaaagaggtcacgcagaatgacggtacgacgacgattgccaataaccttaccagcacggttcaggtgtttactgactcggagtaccagctcccgtacgtcctcggctcggcgcatcaaggatgcctcccgccgttcccagcagacgtcttcatggtgccacagtatggatacctcaccctgaacaacgggagtcaggcagtaggacgctcttcattttactgcctggagtactttccttctcagatgctgcgtaccggaaacaactttaccttcagctacacttttgaggacgttcctttccacagcagctacgctcacagccagagtctggaccgtctcatgaatcctctcatcgaccagtacctgtattacttgagcacaacaaacactccaagtggaaccaccacgcagtcaaggctccagttttctcaggccggagcgagtgacattcgggaccagtctaggaactggcttcctggaccctgttaccgccagcagcgagtatcaaagacatctgcggataacaacaacagtgaatactcgtggactggagctaccaagtaccacctcaatggcagagactctctggtgaatccgggcccggccatggcaagccacaaggacaatgaagaaaagttttttcctcagagcggggttctcatctttgggaagcaaggctcagagaaaacaaatgtggacattgaaaaggtcatgattacagacgaagaggaaatcaggacaaccaatcccgtggctacggagcagtatggttctgtatctaccaacctccagagaggcaacagacaagcagctaccgcagatgtcaacacacaaggcgttcttccaggcatggtctggcaggacagagatgtgtaccttcaggggcccatctgggcaaagattccacacacggacggacattttcacccctctcccctcatgggtggattcggacttaaacaccctcctccacagattctcatcaagaacaccccggtacctgcgaatccttcgaccaccttcagtgcggcaaagtttgcttccttcatcacacagtactccacgggacaggtcagcgtggagatcgagtgggagctgcagaaggaaaacagcaaacgctggaatcccgaaattcagtacacttccaactacaacaagtctgttaatgtggactttactgtggacactaatggcgtgtattcagagcctcgccccattggcaccagatacctgactcgtaatctgtaa

SEQ ID NO: 275 - protein, 735 aa, Adeno-associated virus
MAADGYLPDWLEDTLSEGIRQWWKLKPGPPPPKPAERHRDDSRGLVLPGYKYLGPFNGLDKGEPVNEADAAALEHDKAYDRQLDSGDNPYLKYNHADAEFQERLKEDTSFGGNLGRAVFQAKKRVLEPLGLVGEPVKTAPGKKRPVEHSPVEPDSSSGTGKAGQQPARKRLNFGQTGDADSVPDPQPLGQPPAAPSGLGTNTMATGSGAPMADNNEGADGVGNSSGNWHCDSTWMGDRVITTSTRTWALPTYNNHLYKQISSQSGASNDSHYFGYSTPWGYFDFNRFHCHFSPRDWQRLINNNWGFRPKRLNFKLFNIQVKEVTQNDGTTTIANNLTSTVQVFTDSEYQLPYVLGSAHQGCLPPFPADVFMVPQYGYLTLNNGSQAVGRSSFYCLEYFPSQMLRTGNNFTFSYTFEDVPFHSSYAHSQSLDRLMNPLIDQYLYYLSTTNTPSGTTTQSRLQFSQAGASDIRDQSRNWLPGPCYRQQRVSKTSADNNNSEYSWTGATKYHLNGRDSLVNPGPAMASHKDNEEKFFPQSGVLIFGKQGSEKTNVDIEKVMITDEEEIRTTNPVATEQYGSVSTNLQRGNRQAATADVNTQGVLPGMVWQDRDVYLQGPIWAKIPHTDGHFHPSPLMGGFGLKHPPPQILIKNTPVPANPSTTFSAAKFASFITQYSTGQVSVEIEWELQKENSKRWNPEIQYTSNYNKSVNVDFTVDTNGVYSEPRPIGTRYLTRNL

SEQ ID NO: 276 - protein, 737 aa, Adeno-associated virus
RMAADGYLPDWLEDNLSEGIREWWDLKPGAPKPKANQQKQDDGRGLVLPGYKYLGPFNGLDKGEPVNAADAAALEHDKAYDQQLKAGDNPYLRYNHADAEFQERLQEDTSFGGNLGRAVFQAKKRVLEPLGLVEEGAKTAPGKKRPVEQSPQEPDSSSGIGKTGQQPAKKRLNFGQTGDSESVPDPQPLGEPPATPAAVGPTTMASGGGAPMADNNEGADGVGNASGNWHCDSTWLGDRVITTSTRTWALPTYNNHLYKQISSTSTGASNDNHYFGYGTPWGYFDFNRFHCHFSPRDWQRLINNNWGFRPKRLNFKLFNIQVEEVTTNDGVTTIANNLTSTVQVFSDSEYQLPYVLGSAHQGCLPPFPADVFMIPQYGYLTLNNGSQAVGRSSFYCLEYFPSQMLRTGNNFTFSYTFEEVPFHSSYAHSQSLDRLMNPLIDQYLYYLNRTQNQSGSAQNKDLLFSRGSPAGMSVQPKNWLPGPCYRQQRVSKTKTDNNNSNFTWTGASKYNLNGRESIINPGTAVASHKDDEDKFFPMSGVMIFGKESAGASSTALDNVMITDEEEIKATNPVATERFGTVAVNFQSSSTDPATGDVHAMGALPGMVWQDRDVYLQGPIWAKIPHTDGHFHPSPLMGGFGLKNPPPQILIKNTPVPANPPAEFSATKFASFITQYSTGQVSVEIEWELQKENSKRWNPEVQYTSNYAKSANVDFTVDNNGLYTEPRPIGTRYLTRPL

SEQ ID NO: 277 - protein, 736 aa, Adeno-associated virus
MAADGYLPDWLEDNLSEGIREWWDLKPGAPKPKANQQKQDDGRGLVLPGYKYLGPFNGLDKGEPVNAADAAALEHDKAYDQQLKAGDNPYLRYNHADAEFQERLQEDTSFGGNLGRAVFQAKKRVLEPLGLVEEGAKTAPGKKRPVEQSPQEPDSSSGIGKTGQQPAKKRLNFGQTGDSESVPDPQPLGEPPATPAAVGPTTMASGGGAPMADNNEGADGVGNASGNWHCDSTWLGDRVITTSTRTWALPTYNNHLYKQISSTSTGASNDNHYFGYGTPWGYFDFNRFHCHFSPRDWQRLINNNWGFRPKRLNFKLFNIQVEEVTTNDGVTTIANNLTSTVQVFSDSEYQLPYVLGSAHQGCLPPFPADVFMIPQYGYLTLNNGSQAVGRSSFYCLEYFPSQMLRTGNNFTFSYTFEEVPFHSSYAHSQSLDRLMNPLIDQYLYYLNRTQNQSGSAQNKDLLFSRGSPAGMSVQPKNWLPGPCYRQQRVSKTKTDNNNSNFTWTGASKYNLNGRESIINPGTAVASHKDDEDKFFPMSGVMIFGKESAGASSTALDNVMITDEEEIKATNPVATERFGTVAVNFQSSSTDPATGDVHAMGALPGMVWQDRDVYLQGPIWAKIPHTDGHFHPSPLMGGFGLKNPPPQILIKNTPVPANPPAEFSATKFASFITQYSTGQVSVEIEWELQKENSKRWNPEVQYTSNYAKSANVDFTVDNNGLYTEPRPIGTRYLTRPL

SEQ ID NO: 278 - DNA, 2211 bp, Adeno-associated virus
atggctgccgatggttatcttccagattggctcgaggacaacctctctgagggcattcgcgagtggtgggacttgaaacctggagccccgaagcccaaagccaaccagcaaaagcaggacgacggccggggtctggtgcttcctggctacaagtacctcggacccttcaacggactcgacaagggggagcccgtcaacgcggcggacgcagcggccctcgagcacgacaaggcctacgaccagcagctcaaagcgggtgacaatccgtacctgcggtataaccacgccgacgccgagtttcaggagcgtctgcaagaagatacgtcttttgggggcaacctcgggcgagcagtcttccaggccaagaagcgggttctcgaacctctcggtctggttgaggaaggcgctaagacggctcctggaaagaaacgtccggtagagcagtcgccacaagagccagactcctcctcgggcatcggcaagacaggccagcagcccgctaaaaagagactcaattttggccagactggcgactcagagtcagtccccgatccacaacctctcggagaacctccagcaacccccgctgctgtgggacctactacaatggcttcaggcggtggcgcaccaatggcagacaataacgaaggcgccgacggagtgggtaatgcctcaggaaattggcattgcgattccacatggctgggcgacagagtcatcaccaccagcacccgcacctgggccttgcccacctacaataaccacctctacaagcaaatctccagtacttcaacgggggccagcaacgacaaccactacttcggctacggcaccccctgggggtattttgatttcaacagattccactgccacttttcaccacgtgactggcagcgactcatcaacaacaattggggattccggcccaagagactcaacttcaaactcttcaacatccaagtcgaggaggtcacgacgaatgatggcgtcacaaccatcgctaataaccttaccagcacggttcaagtcttctcggactcggagtaccagcttccgtacgtcctcggctctgcgcaccagggctgcctccctccgttcccggcggacgtgttcatgattccgcaatacggctacctgacgctcaacaatggcagccaagccgtgggacgttcatccttttactgcctggaatatttcccttctcagatgctgagaacgggcaacaactttaccttcagctacacctttgaggaagtgcctttccacagcagctacgcgcacagccagagcctggaccggctgatgaatcctctcatcgaccaatacctgtattacctgaacagaacacaaaatcagtccggaagtgcccaaaacaaggacttgctgtttagccgtgggtctccagctggcatgtctgttcagcccaaaaactggctacctggaccctgttatcggcagcagcgcgtttctaaaacaaaaacagacaacaacaacagcaattttacctggactggtgcttcaaaatataacctcaatgggcgtgaatccatcatcaaccctggcaccgctgtggcctcacacaaagacgacgaagacaagttctttcccatgagcggtgtcatgatttttggaaaagagagcgccggagcttcaagcactgcattggacaatgtcatgattacagacgaagaggaaattaaagccactaaccctgtggccaccgaaagatttgggaccgtggcagtcaatttccagagcagcagcacagaccctgcgaccggagatgtgcatgctatgggagcattacctggcatggtgtggcaagatagagacgtgtacctgcagggtcccatttgggccaaaattcctcacacagatggacactttcacccgtctcctcttatgggcggctttggactcaagaacccgcctcctcagatcctcatcaaaaacacgcctgttcctgcgaatcctccggcggagttttcagctacaaagtttgcttcattcatcacccaatactccacaggacaagtgagtgtggaaattgaatgggagctgcagaaagaaaacagcaagcgctggaatcccgaagtgcagtacacatccaattatgcaaaatctgccaacgttgattttactgtggacaacaatggactttatactgagcctcgccccattggcacccgttaccttacccgtcccctgtaa

SEQ ID NO: 279 - protein, 737 aa, Adeno-associated virus
RMAADGYLPDWLEDNLSEGIREWWDLKPGAPKPKANQQKQDDGRGLVLPGYKYLGPFNGLDKGEPVNAADAAALEHDKAYDQQLKAGDNPYLRYNHADAEFQERLQEDTSFGGNLGRAVFQAKKRVLEPLGLVEEGAKTAPGKKRPVEQSPQEPDSSSGIGKTGQQPAKKRLNFGQTGDSESVPDPQPLGEPPATPAAVGPTTMASGGGAPMADNNEGADGVGNASGNWHCDSTWLGDRVITTSTRTWALPTYNNHLYKQISSTSTGASNDNHYFGYSTPWGYFDFNRFHCHFSPRDWQRLINNNWGFRPKRLNFKLFNIQVEEVTTNDGVTTIANNLTSTVQVFSDSEYQLPYVLGSAHQGCLPPFPADVFMIPQYGYLTLNNGSQAVGRSSFYCLEYFPSQMLRTGNNFTFSYTFEEVPFHSSYAHSQSLDRLMNPLIDQYLYYLNRTQNQSGSAQNKDLLFSRGSPAGMSVQPKNWLPGPCYRQQRVSKTKTDNNNSNFTWTGASKYNLNGRESIINPGTAVASHKDDEDKFFPMSGVMIFGKESAGASSTALDNVMITDEEEIKATNPVATERFGTVAVNFQSSSTDPATGDVHAMGALPGMVWQDRDVYLQGPIWAKIPHTDGHFHPSPLMGGFGLKNPPPQILIKNTPVPANPPAEFSATKFASFITQYSTGQVSVEIEWELQKENSKRWNPEVQYTSNYAKSANVDFTVDNNGLYTEPRPIGTRYLTRPL

SEQ ID NO: 280 - protein, 737 aa, Adeno-associated virus
RMAADGYLPDWLEDNLSEGIREWWDLKPGAPKPKANQQKQDDGRGLVLPGYKYLGPFNGLDKGEPVNAADAAALEHDKAYDQQLKAGDNPYLRYNHADAEFQERLQEDTSFGGNLGRAVFQAKKRVLEPLGLVEEGAKTAPGKKRPVEQSPQEPDSSSGIGKTGQQPAKKRLNFGQTGDSESVPDPQPLGEPPATPAAVGPTTMASGGGAPMADNNEGADGVGNASGNWHCDSTWLGDRVITTSTRTWALPTYNNHLYKQISSTSTGASNDNHYFGYSTPWGYFDFNRFHCHFSPRDWQRLINNNWGFRPKRLNFKLFNIQVKEVTTNDGVTTIANNLTSTVQVFSDSEYQLPYVLGSAHQGCLPPFPADVFMIPQYGYLTLNNGSQAVGRSSFYCLEYFPSQMLRTGNNFTFSYTFEEVPFHSSYAHSQSLDRLMNPLIDQYLYYLNRTQNQSGSAQNKDLLFSRGSPAGMSVQPKNWLPGPCYRQQRVSKTKTDNNNSNFTWTGASKYNLNGRESIINPGTAVASHKDDEDKFFPMSGVMIFGKESAGASSTALDNVMITDEEEIKATNPVATERFGTVAVNFQSSSTDPATGDVHAMGALPGMVWQDRDVYLQGPIWAKIPHTDGHFHPSPLMGGFGLKNPPPQILIKNTPVPANPPAEFSATKFASFITQYSTGQVSVEIEWELQKENSKRWNPEVQYTSNYAKSANVDFTVDNNGLYTEPRPIGTRYLTRPL

SEQ ID NO: 281 - protein, 737 aa, Adeno-associated virus
RMAADGYLPDWLEDNLSEGIREWWDLKPGAPKPKANQQKQDDGRGLVLPGYKYLGPFNGLDKGEPVNAADAAALEHDKAYDQQLKAGDNPYLRYNHADAEFQERLQEDTSFGGNLGRAVFQAKKRVLEPLGLVEEGAKTAPGKKRPVEQSPQEPDSSSGIGKTGQQPAKKRLNFGQTGDSESVPDPQPLGEPPATPAAVGPTTMASGGGAPMADNNEGADGVGNASGNWHCDSTWLGDRVITTSTRTWALPTYNNHLYKQISSTSTGASNDNHYFGYSTPWGYFDFNRFHCHFSPRDWQRLINNNWGFRPKRLNFKLFNIQVKEVTTNDGVTTIANNLTSTVQVFSDSEYQLPYVLGSAHQGCLPPFPADVFMIPQYGYLTLNNGSQAVGRSSFYCLEYFPSQMLRTGNNFTFSYTFEEVPFHSSYAHSQSLDRLMNPLIDQYLYYLNRTQNQSGSAQNKDLLFSRGSPAGMSVQPKNWLPGPCYRQQRVSKTKTDNNNSNFTWTGASKYNLNGRESIINPGTAVASHKDDEDKFFPMSGVMIFGKESAGANSTALDNVMITDEEEIKATNPVATERFGTVAVNFQSSSTDPATGDVHAMGALPGMVWQDRDVYLQGPIWAKIPHTDGHFHPSPLMGGFGLKNPPPQILIKNTPVPANPPAEFSATKFASFITQYSTGQVSVEIEWELQKENSKRWNPEVQYTSNYAKSANVDFTVDNNGLYTEPRPIGTRYLTRPL

SEQ ID NO: 282 - DNA, 2208 bp, Adeno-associated virus
atggctgccgatggttatcttccagattggctcaaggacactctctctgaaggaataagacagtggtggaagctcaaacctggcccaccaccaccaaagcccgcagagcggcataaggacgacagcgggggtcttgtgcttcctgggtacaagtacctcggacccttcaacggactcgacaagggagagccggtcaacgaggcagacgccgcggccctcgagtacgacaaggcctacgaccggcagctcgacagcggagacaacccgtacctcaagtacaaccacgccgacgcggagtttcaggagcgccttaaagaagatacgtcttttgggggcaacctcggacgagcagtcttccaggcgaaaaagagggttcttgaacctctgggcctggttgaggaacctgttaagacggctccgggaaaaaagaggccggtagagcactctcctgtggagccagactcctcctcgggaacaggaaaagcgggccagcagcctgcgagaaagagattgaattttggtcagactggagacgcagactccgtacctgacccccagcctctcggacagccaccagcagccccctctggtctgggaactaatacgatggctacaggcagtggcgcaccaatggcagacaataacgagggcgccgacggagtgggtaattcctcgggaagttggcattgcgattccacatggatgggcgacagagtcatcaccaccagcacccgaacctgggctctgcccacctacaacaaccatctgtacaagcagatctccagccaatcaggagccagcaacgacaaccactactttggctacagcaccccttgggggtattttgacttcaacagattccactgccacttttcaccacgtgactggcaaagactcatcaacaacaactggggattccggcccaagagactcaacttcaagctctttaacattcaagtcaaggaggtcacgcagaatgacggtacgacgacgattgccaataaccttaccagcacggttcaggtgtttactgactcggagtaccagctcccgtacgtccccggctcggcgcatcaaggatgcctcccgccgttcccagcagacgtcttcatggtgccacagtatggatacctcaccctgaacaacgggagtcaggcagtaggacgctcttcattttactgcctggagtactttccttctcagatgcttcgtaccggaaacaactttaccttcagctacacctttgaggatgttcctttccacagcagctacgctcacagccagagtttggaccgtctcatgaatcctctcatcgaccagtacctgtattacttgagcagaacaaacactccaagcggaaccaccacgcagtccaggcttcagttttctcaggccggagcaagtgacattcgggaccagtctaggaactggcttcctggaccctgttaccgccagcagcgagtatcaaagacagctgcggacaacaacaacagtgaatactcgtggactggagctaccaagtaccacctcaatggcagagactctctggtgaatccgggcccggccatggccagccacaaggacgatgaagaaaagttttttcctcaaagcggggttctcatctttgggaagcaaggctcagagaaaacaaatgtggacattgaaaaggtcatgattacagacgaagaggaaatcagaaccaccaatcccgtggccacggagcagtatggttctgtatctaccaacctccagagcggcaacacacaagcagctactgcagatgtcaacacacaaggcgttcttccaggcatggtctggcaggacagagacgtgcacctgcaggggcctatctgggcaaagattccacacacggacggacattttcacccctctcccctcatgggcggatttggacttaaacaccctcctccacagattctcatcaagaacaccccggtacctgcaaatccttcgaccaccttcagtgcggcaaagtttgcttccttcatcacacagtattccacagggcaggtcagcgtggagatcgagtgggagctgcagaaggagaacagcaaacgctggaaccccgagatccagtacacttccaactacaacaaatctgttaatgtggactttactgtggacactaatggtgtgtattcagagcctcgccccattggcaccagatacctgactcgtaatctgtaa

SEQ ID NO: 283 - protein, 735 aa, Adeno-associated virus
MAADGYLPDWLKDTLSEGIRQWWKLKPGPPPPKPAERHKDDSGGLVLPGYKYLGPFNGLDKGEPVNEADAAALEYDKAYDRQLDSGDNPYLKYNHADAEFQERLKEDTSFGGNLGRAVFQAKKRVLEPLGLVEEPVKTAPGKKRPVEHSPVEPDSSSGTGKAGQQPARKRLNFGQTGDADSVPDPQPLGQPPAAPSGLGTNTMATGSGAPMADNNEGADGVGNSSGSWHCDSTWMGDRVITTSTRTWALPTYNNHLYKQISSQSGASNDNHYFGYSTPWGYFDFNRFHCHFSPRDWQRLINNNWGFRPKRLNFKLFNIQVKEVTQNDGTTTIANNLTSTVQVFTDSEYQLPYVPGSAHQGCLPPFPADVFMVPQYGYLTLNNGSQAVGRSSFYCLEYFPSQMLRTGNNFTFSYTFEDVPFHSSYAHSQSLDRLMNPLIDQYLYYLSRTNTPSGTTTQSRLQFSQAGASDIRDQSRNWLPGPCYRQQRVSKTAADNNNSEYSWTGATKYHLNGRDSLVNPGPAMASHKDDEEKFFPQSGVLIFGKQGSEKTNVDIEKVMITDEEEIRTTNPVATEQYGSVSTNLQSGNTQAATADVNTQGVLPGMVWQDRDVHLQGPIWAKIPHTDGHFHPSPLMGGFGLKHPPPQILIKNTPVPANPSTTFSAAKFASFITQYSTGQVSVEIEWELQKENSKRWNPEIQYTSNYNKSVNVDFTVDTNGVYSEPRPIGTRYLTRNL

SEQ ID NO: 284 - DNA, 2208 bp, Adeno-associated virus
atggctgccgatggttatcttccagattggctcgaggacactctctctgaaggaataagacagtggtggaagctcaaacctggcccaccaccaccaaagcccgcagagcggcataaggacgacagcaggggtcttgtgcttcctgggtacaagtacctcggacccttcaacggactcgacaagggggagccggtcaacgaggcagacgccgcggccctcgagcacgacaaggcctacgaccggcagctcgacagcggagacaacccgtacctcaagtacaaccacgccgacgcagagtttcaggagcgccttaaagaagatacgtcttttgggggcaacctcggacgagcagtcttccaggcgaaaaagagggttcttgaacctctgggcctggttgaggaacctgttaagacggctccgggaaaaaagaggccggtagagcactctcctgtggagccagactcctcctcgggaaccggaaaagcgggccagcagcctgcaagaaaaagattaaattttggtcagactggagacgcagactccgtacctgacccccagcctctcggacagccaccagcagccccctctggtctgggatctactacaatggctacaggcagtggcgcaccaatggcagacaataacgagggtgccgatggagtgggtaattcctcaggaaattggcattgcgattcccaatggctgggcgacagagtcatcaccaccagcacccgaacctgggccctgcccacatacaacaaccacctctacaagcaaatctccagccaatcaggagccagcaacgacaaccactactttggctacagcaccccctgggggtattttgacttcaacagattccactgccacttttcaccacgtgactggcaaagactcatcaacaacaactggggattccggcccaaaagactcaacttcaagctctttaatattcaagtcaaagaggtcacgcagaatgacggtacgacgacgattgccaataaccttaccagcacggttcaggtgtttactgactcggagtaccagctcccgtacgtcctgggctcggcgcatcaaggatgcctcccgccgtttccagcggacgtcttcatggtcccacagtatggatacctcaccctgaacaacgggagtcaggcggtaggacgctcttccttttactgcctggagtactttccttctcagatgctgcgtactggaaacaactttcagttcagctacacttttgaagacgtgcctttccacagcagctacgctcacagccagagtctggatcggctgatgaatcctctgatcgaccagtacctgtattatctgaacaagacacaaacaaatagtggaactcttcagcagtctcggctactgtttagccaagctggaccaaccaacatgtctcttcaagctaaaaactggctgcctggaccttgctacagacagcagcgtctgtcaaaacaggcaaacgacaacaacaacagcaactttccctggactgcagctacaaagtatcatctaaatggccgggactcgttggttaatccaggaccagctatggccagtcgcaaggatgacgaagaaaagtttttccccatgcatggaaccctgatatttggtaaacaaggaacaaatgccaacgacgcggatttggaaaatgtcatgattacagatgaagaagaaatcagggccaccaatcccgtggctacggagcagtacgggactgtgtcaaataatttgcaaaactcaaacactggtccaactactggaactgtcaatcaccaaggagcgttacctggtatggtgtggcaggatcgagacgtgtacctgcagggacccatttgggccaagattcctcacaccgatggacactttcatccttctccactgatgggaggttttggactcaaacacccgcctcctcagatcatgatcaaaaacactcccgttccagccaatcctcccacaaacttcagttctgccaagtttgcttctttcatcacacagtattccacgggacaggtcagcgtggagatcgagtgggagctgcagaaggagaacagcaaacgctggaatcccgaaattcagtacacttccaactacaacaagtctgttaatgtggactttactgtggacactaatggtgtgtattcagagcctcgccccattggcaccagatacctgactcgtaatctgtaa

SEQ ID NO: 285 - protein, 735 aa, Adeno-associated virus
MAADGYLPDWLEDTLSEGIRQWWKLKPGPPPPKPAERHKDDSRGLVLPGYKYLGPFNGLDKGEPVNEADAAALEHDKAYDRQLDSGDNPYLKYNHADAEFQERLKEDTSFGGNLGRAVFQAKKRVLEPLGLVEEPVKTAPGKKRPVEHSPVEPDSSSGTGKAGQQPARKRLNFGQTGDADSVPDPQPLGQPPAAPSGLGSTTMATGSGAPMADNNEGADGVGNSSGNWHCDSQWLGDRVITTSTRTWALPTYNNHLYKQISSQSGASNDNHYFGYSTPWGYFDFNRFHCHFSPRDWQRLINNNWGFRPKRLNFKLFNIQVKEVTQNDGTTTIANNLTSTVQVFTDSEYQLPYVLGSAHQGCLPPFPADVFMVPQYGYLTLNNGSQAVGRSSFYCLEYFPSQMLRTGNNFQFSYTFEDVPFHSSYAHSQSLDRLMNPLIDQYLYYLNKTQTNSGTLQQSRLLFSQAGPTNMSLQAKNWLPGPCYRQQRLSKQANDNNNSNFPWTAATKYHLNGRDSLVNPGPAMASRKDDEEKFFPMHGTLIFGKQGTNANDADLENVMITDEEEIRATNPVATEQYGTVSNNLQNSNTGPTTGTVNHQGALPGMVWQDRDVYLQGPIWAKIPHTDGHFHPSPLMGGFGLKHPPPQIMIKNTPVPANPPTNFSSAKFASFITQYSTGQVSVEIEWELQKENSKRWNPEIQYTSNYNKSVNVDFTVDTNGVYSEPRPIGTRYLTRNL

SEQ ID NO: 286 - DNA, 2208 bp, Adeno-associated virus
atggctgccgatggttatcttccagattggctcgaggacactctctctgaaggaataagacagtggtggaagctcaaacctggcccaccaccaccaaagcccgcagagcggcataaggacgacagcaggggtcttgtgcttcctgggtacaagtacctcggacccttcaacggactcgacaagggagagccggtcaacgaggcagacgccgcggccctcgagcacgacaaagcctacgaccggcagctcgacagcggagacaacccgtacctcaagtacaaccacgccgacgcggagtttcaggagcgccttaaagaagatacgtcttttgggggcaacctcggacgagcagtcttccaggcgaaaaagagggttcttgaacctctgggcctggttggggaacctgtcaagacggctccaggaaaaaagaggccggtagagcactctcctgtggagccagactcctcctcgggaaccggaaaggcgggccagcagcctgcaagaaaaagattgaattttggtcagactggagacgcagactcagtacctgacccccagcctctcggacagccaccagcagccccctctggtctgggaactaatacgatggctacaggcagtggcgcaccaatggcagacaataacgagggcgccgacggagtgggtaattcctcgggaaattggcattgcgattccacatggatgggcgacagagtcatcaccaccagcacccgaacctgggccctgcccacctacaacaaccacctctacaaacaaatttccagccaatcaggagcctcgaacgacaatcactactttggctacagcaccccttgggggtattttgacttcaacagattccactgccacttttcaccacgtgactggcaaagactcatcaacaacaactggggattccgacccaagagactcaacttcaagctctttaacattcaagtcaaagaggtcacgcagaatgacggtacgacgacgattgccaataaccttaccagcacggttcaggtgtttactgactcggagtaccagctcccgtacgtcctcggctcggcgcatcaaggatgcctcccgccgttcccagcagacgtcttcatggtgccacagtatggatacctcaccctgaacaacgggagtcaggcagtaggacgctcttcattttactgcctggagtactttccttctcagatgctgcgtaccggaaacaactttaccttcagctacacttttgaggacgttcctttccacagcggctacgctcacagccagagtctggaccgtctcatgaatcctctcatcgaccagtacctgtattacttgagcacaacaaacactccaagtggaaccaccacgcagtcaaggcttcagttttctcaggccggagcgagtgacattcgggaccagtctaggaactggcttcctggaccctgttaccgccagcagcgagtatcaaagacatctgcggataacaacaacagtgaatactcgtggactggagctaccaagtaccacctcaatggcagagactctctggtgaatccgggcccggccatggcaagccacaaggacaatgaagaaaagttttttcctcagagcggggttctcatctttgggaagcaaggctcagagaaaacaaatgtggacattgaaaaggtcatgattacagacgaagaggaaatcaggacaaccaatcccgtggctacggagcagtacggttctgtatctaccaacctccagagaggcaacagacaagcagctaccgcagatgtcaacacacaaggcgttcttccaggcatggtctggcaggacagagatgtgtaccttcaggggcccatctgggcaaagattccacacacggacggacattttcacccctctcccctcatgggtggattcggacttaaacaccctcctccacagattctcatcaagaacaccccggtacctgcgaatccttcgaccaccttcagtgcggcaaagtttgcttccttcatcacacagtactccacgggacaggtcagcgtggagatcgagtgggagctgcagaaggaaaacagcaaacgctggaatcccgaaattcagtacacttccaactacaacaagtctgttaatgtggactttactgtggacactaatggcgtgtattcagagcctcgccccattggcaccagatacctgactcgtaatctgtaa

SEQ ID NO: 287 - protein, 735 aa, Adeno-associated virus
MAADGYLPDWLEDTLSEGIRQWWKLKPGPPPPKPAERHKDDSRGLVLPGYKYLGPFNGLDKGEPVNEADAAALEHDKAYDRQLDSGDNPYLKYNHADAEFQERLKEDTSFGGNLGRAVFQAKKRVLEPLGLVGEPVKTAPGKKRPVEHSPVEPDSSSGTGKAGQQPARKRLNFGQTGDADSVPDPQPLGQPPAAPSGLGTNTMATGSGAPMADNNEGADGVGNSSGNWHCDSTWMGDRVITTSTRTWALPTYNNHLYKQISSQSGASNDNHYFGYSTPWGYFDFNRFHCHFSPRDWQRLINNNWGFRPKRLNFKLFNIQVKEVTQNDGTTTIANNLTSTVQVFTDSEYQLPYVLGSAHQGCLPPFPADVFMVPQYGYLTLNNGSQAVGRSSFYCLEYFPSQMLRTGNNFTFSYTFEDVPFHSGYAHSQSLDRLMNPLIDQYLYYLSTTNTPSGTTTQSRLQFSQAGASDIRDQSRNWLPGPCYRQQRVSKTSADNNNSEYSWTGATKYHLNGRDSLVNPGPAMASHKDNEEKFFPQSGVLIFGKQGSEKTNVDIEKVMITDEEEIRTTNPVATEQYGSVSTNLQRGNRQAATADVNTQGVLPGMVWQDRDVYLQGPIWAKIPHTDGHFHPSPLMGGFGLKHPPPQILIKNTPVPANPSTTFSAAKFASFITQYSTGQVSVEIEWELQKENSKRWNPEIQYTSNYNKSVNVDFTVDTNGVYSEPRPIGTRYLTRNL

SEQ ID NO: 288 - DNA, 2208 bp, Adeno-associated virus
atggctgccgatggttatcttccagattggctcgaggacactctctctgaaggaataagacagtggtggaagctcaaacctggcccaccaccaccaaagcccgcagagcggcataaggacgacagcaggggtcttgtgcttcctgggtacaagtacctcggacccttcaacggactcgacaagggagagccggtcaacgaggcagacgccgcggccctcgagcacgacaaagcctacgaccggcagctcgacagcggagacaacccgtacctcaagtacaaccacgccgacgcggagtttcaggagcgccttaaagaagatacgtcttttgggggcaacctcggacgagcagtcttccaggcgaaaaagagggttcttgaacctctgggcctggttggggaacctgttaagacggctccgggaaaaaagaggccggtagagcactctcctgtggagccagactcctcctcgggaaccggaaaggcgggccagcagcctgcaagaaaaagattgaattttggtcagactggagacgcagactcagtacctgacccccagcctctcggacagccaccagcagccccctctggtctgggaactaatacgatggctacaggcagtggcgcaccaatggcagacaataacgagggcgccgacggagtgggtaattcctcgggaaatcggcattgcgattccacatggatgggcgacagagtcatcaccaccagcacccgaacctgggccctgcccacctacaacaaccacctctacagacaaatttccagccaatcaggagcctcgaacgacaatcactactttggctacagcaccccttgggggtattttgacttcaacagattccactgccacttttcaccacgtgactggcaaagactcatcaacaacaactggggattccgacccaagagactcaacttcaagctctttaacattcaagtcaaagaggtcacgcagaatgacggtacgacgacgattgccaataaccttaccagcacggttcaggtgtttactgactcggagtaccagctcccgtacgtcctcggctcggcgcatcaaggatgcctcccgccgttcccagcagacgtcttcatggtgccacagtatggatacctcaccctgagcaacgggagtcaggcagtaggacgctcttcattttactgcccggagtactttccttctcagatgctgcgtaccggaaacaactttaccttcagctacacttttgaggacgttcctttccacagcagctacgctcacagccagagtctggaccgtctcatgaatcctctcatcgaccagtacctgtattacttgagcacaacaaacactccaagtggaaccaccacgcagtcaaggcttcagttttctcaggccggagcgagtgacattcgggaccagtctaggaactggcttcctggaccctgttaccgccagcagcgagtatcaaagacatctgcggataacaacaacagtgaatactcgtggactggagctaccaagtaccacctcaatggcagagactctctggtgaatccgggcccggccatggcaagccacaaggacaatgaagaaaagttttttcctcagagcggggttctcatctttgggaagcaaggctcagagaaaacaaatgtggacattgaaaaggtcatgattacagacgaagaggaaatcaggacaaccaatcccgtggctacggagcagtatggttctgtatctaccaacctccagagaggcaacagacaagcagctaccgcagatgtcaacacacaaggcgttcttccaggcatggtctggcaggacagagatgtgtaccttcaggggcccatctgggcaaagattccacacacggacggacattttcacccctctcccctcatgggtggattcggacctaaacaccctcctccacagattctcatcaagaacaccccggtacctgcgaatccttcgaccaccttcagtgcggcaaagtttgcttccttcatcacacagtactccacgggacaggtcagcgtggagatcgagtgggagctgcagaaggaaaacagcaaacgctggaatcccgaaattcagtacacttccaactacaacaagtctgttaatgtggactttactgtggacactaatggcgtgtattcagagcctcgccccattggcaccagatacctgactcgtaatttgtaa

SEQ ID NO: 289 - protein, 735 aa, Adeno-associated virus
MAADGYLPDWLEDTLSEGIRQWWKLKPGPPPPKPAERHKDDSRGLVLPGYKYLGPFNGLDKGEPVNEADAAALEHDKAYDRQLDSGDNPYLKYNHADAEFQERLKEDTSFGGNLGRAVFQAKKRVLEPLGLVGEPVKTAPGKKRPVEHSPVEPDSSSGTGKAGQQPARKRLNFGQTGDADSVPDPQPLGQPPAAPSGLGTNTMATGSGAPMADNNEGADGVGNSSGNRHCDSTWMGDRVITTSTRTWALPTYNNHLYRQISSQSGASNDNHYFGYSTPWGYFDFNRFHCHFSPRDWQRLINNNWGFRPKRLNFKLFNIQVKEVTQNDGTTTIANNLTSTVQVFTDSEYQLPYVLGSAHQGCLPPFPADVFMVPQYGYLTLSNGSQAVGRSSFYCPEYFPSQMLRTGNNFTFSYTFEDVPFHSSYAHSQSLDRLMNPLIDQYLYYLSTTNTPSGTTTQSRLQFSQAGASDIRDQSRNWLPGPCYRQQRVSKTSADNNNSEYSWTGATKYHLNGRDSLVNPGPAMASHKDNEEKFFPQSGVLIFGKQGSEKTNVDIEKVMITDEEEIRTTNPVATEQYGSVSTNLQRGNRQAATADVNTQGVLPGMVWQDRDVYLQGPIWAKIPHTDGHFHPSPLMGGFGPKHPPPQILIKNTPVPANPSTTFSAAKFASFITQYSTGQVSVEIEWELQKENSKRWNPEIQYTSNYNKSVNVDFTVDTNGVYSEPRPIGTRYLTRNL

SEQ ID NO: 290 - DNA, 2205 bp, Adeno-associated virus
atggctgccgatggttatcttccagattggctcgaggacactctctctgaaggaataagacagtggtggaagctcaaacctggcccaccaccaccaaagcccgcagagcggcataaggacgacagcaggggtcttgtgcttcctgggtacaagtacctcggacccttcaacggactcgacaagggagagccggtcaacgaggcagacgccgcggccctcgagcacgacaaggcctacgaccggcagctcgacagcggagacaacccgtacctcaagtacaaccacgccgacgcggagtttcaggagcgtcttaaagaagatacgtcttttgggggcaacctcggacgagcagtcttccaggcgaaaaagagggttcttgaacctctgggcctggttgaggaacctgttaagacggctccgggaaaaaagaggccggtagagcactctcctgcggagccagactcctcctcgggaaccggaaaagcgggccagcagcctgcaagaaaaagactgaatttcggtcagactggagacgcagactccgtacctgacccccagcctctcagacagccaccagcagcccccacaagtttgggatctactacaatggctacaggcagtggcgcaccaatggcagacaataacgagggtgccgatggagtgggtaattcctcaggaaattggcattgcgattcccaatggctgggcgacagagtcatcaccaccagcacccgaacctgggccctgcccacctacaacaaccacctttacaagcaaatctccagccaatcaggagcctcaaacgacaaccactactttggctacagcaccccctgggggtattttgacttcaacagattccactgccacttttcaccacgtgactggcaaagactcatcaacaacaactggggattccgacccaagagactcaacttcaagctctttaacattcaagtcaaagaggtcacgcagaatgacggtacgacgacgattgccaataaccttaccagcacggttcaggtgtttactgactcggagtaccagctcccgtacgtcctcggctcggcgcatcaaggatgcctcccgccgtttccagcggacgtcttcatggtcccacagtatggatacctcaccctgaacaacgggagtcaggcggtaggacgctcttccttttactgcctggagtactttccttctcagatgctgcgtactggaaacaactttcagttcagctacacttttgaagacgtgcctttccacagcagctacgctcacagccagagtttggatcggctgatgaatcctctgatcgaccagtacctgtattatctaaacagaacacaaacagctagtggaactcagcagtctcggctactgtttagccaagctggacccacaagcatgtctcttcaagctaaaaactggctgcctggaccgtgttatcgccagcagcgtttgtcaaagcaggcaaacgacaacaacaacagcaactttccctggactggagctaccaagtactacctcaatggcagagactctttggtgaacccgggcccggccatggccagccacaaggacgatgaagaaaagtttttccccatgcatggaaccctaatatttggtaaagaaggaacaaatgctaccaacgcggaattggaaaatgtcatgattacagatgaagaggaaatcaggaccaccaatcccgtggctacagagcagtacggatatgtgtcaaataatttgcaaaactcaaatactgctgcaagtactgaaactgtgaatcaccaaggagcattacctggtatggtgtggcaggatcgagacgtgtacctgcagggacccatttgggccaagattcctcacaccgatggacactttcatccttctccactgatgggaggttttggactcaaacacccgcctcctcagattatgatcaaaaacactcccgttccagccaatcctcccacaaacttcagttctgccaagtttgcttccttcatcacacagtattccacgggacaggtcagcgtggagatcgagtgggagctgcagaaggagaacagcaaacgctggaatcccgaaattcagtacacttccaactacaacaaatctgttaatgtggactttactgtggacactaatggtgtgtattcagagcctcgccccattggcaccagatacctgactcgtaatctgtaa

SEQ ID NO: 291 - protein, 734 aa, Adeno-associated virus
MAADGYLPDWLEDTLSEGIRQWWKLKPGPPPPKPAERHKDDSRGLVLPGYKYLGPFNGLDKGEPVNEADAAALEHDKAYDRQLDSGDNPYLKYNHADAEFQERLKEDTSFGGNLGRAVFQAKKRVLEPLGLVEEPVKTAPGKKRPVEHSPAEPDSSSGTGKAGQQPARKRLNFGQTGDADSVPDPQPLRQPPAAPTSLGSTTMATGSGAPMADNNEGADGVGNSSGNWHCDSQWLGDRVITTSTRTWALPTYNNHLYKQISSQSGASNDNHYFGYSTPWGYFDFNRFHCHFSPRDWQRLINNNWGFRPKRLNFKLFNIQVKEVTQNDGTTTIANNLTSTVQVFTDSEYQLPYVLGSAHQGCLPPFPADVFMVPQYGYLTLNNGSQAVGRSSFYCLEYFPSQMLRTGNNFQFSYTFEDVPFHSSYAHSQSLDRLMNPLIDQYLYYLNRTQTASGTQQSRLLFSQAGPTSMSLQAKNWLPGPCYRQQRLSKQANDNNNSNFPWTGATKYYLNGRDSLVNPGPAMASHKDDEEKFFPMHGTLIFGKEGTNATNAELENVMITDEEEIRTTNPVATEQYGYVSNNLQNSNTAASTETVNHQGALPGMVWQDRDVYLQGPIWAKIPHTDGHFHPSPLMGGFGLKHPPPQIMIKNTPVPANPPTNFSSAKFASFITQYSTGQVSVEIEWELQKENSKRWNPEIQYTSNYNKSVNVDFTVDTNGVYSEPRPIGTRYLTRNL

SEQ ID NO: 292 - DNA, 3160 bp, Adeno-associated virus
acccttcactaaagggactagtcctgcaggtttaaacgaattcgcccttgctgcgtcaactggaccaatgagaactttcccttcaacgactgtgtcgacaagatggtgatttggtgggaggaggggaagatgaccgccaaggtcgtggagtcggccaaagccattctcggaggaagcaaggtgcgcgtggaccagaaatgcaagtcctcggcccagatagatccgactcccgtgatcgtcacctccaacaccaacatgtgcgccgtgattgacgggaactcaacgaccttcgaacaccagcagccgttgcaagaccggatgttcaaatttgaactcacccgccgtctggatcatgactttgggaaggtcaccaagcgggaagtcaaagactttttccggtgggcaaaggatcacgtggttgaggtggagcatgaattctacgtcaaaaagggtggagccaagaaaagacccgcccctagtgacgcagatataagtgagcccaaacgggtgcgcgagtcagttgcgcagccatcgacgtcagacgcggaagcttcgatcaactacgcggacaggtaccaaaacaaatgttctcgtcacgtgggcatgaatctgatgctgtttccctgcagacaatgcgagagaatgaatcaaaattcaaatatctgcttcactcacggacagaaagactgtttagagtgctttcccgtgtcagaatctcaacctgtttctgtcgtcaaaaaggcgtatcagaaactgtgctacattcatcatatcatgggaaaggtgccagacgcttgcactgcctgcgatctggtcaatgtggatttggatgactgcatctctgaacaataaatgatttaaatcaggtatggctgccgatggttatcttccagattggctcgaggacactctctctgaaggaataagacagtggtggaagctcaaacctggcccaccaccaccaaagcccgcagagcggcataaggacgacagcaggggtcttgtgcttcctgggtacaagtacctcggacccttcaacggactcgacaagggagagccggtcaacgaggcagacgccgcggccctcgagcacgacaaggcctacgaccggcagctcgacagcggagacaacccgtacctcaagtacaaccacgccgacgcggagtttcaggagcgtcttaaagaagatacgtcttttgggggcaacctcggacgagcagtcttccaggcgaaaaagagggttcttgaacctctgggcctggttgaggaacctgttaagacggctccgggaaaaaagaggccggtagagcactctcctgcggagccagactcctcctcgggaaccggaaaagcgggccagcagcctgcaagaaaaagactgaatttcggtcagactggagacgcagactccgtacctgacccccagcctctcagacagccaccagcagcccccacaagtttgggatctactacaatggctacaggcagtggcgcaccaatggcagacaataacgagggtgccgatggagtgggtaattcctcaggaaattggcattgcgattcccaatggctgggcgacagagtcatcaccaccagcacccgaacctgggccctgcccacctacaacaaccacctttacaagcaaatctccagccaatcaggagcctcaaacgacaaccactactttggctacagcaccccctgggggtattttgacttcaacagattccactgccacttttcaccacgtgactggcaaagactcatcaacaacaactggggattccgacccaagagactcaacttcaagctctttaacattcaagtcaaagaggtcacgcagaatgacggtacgacgacgattgccaataaccttaccagcacggttcaggtgtttactgactcggagtaccagctcccgtacgtcctcggctcggcgcatcaaggatgcctcccgccgtttccagcggacgtcttcatggtcccacagtatggatacctcaccctgaacaacgggagtcaggcggtaggacgctcttccttttactgcctggagtactttccttctcagatgctgcgtactggaaacaactttcagttcagctacacttttgaagacgtgcctttccacagcagctacgctcacagccagagtttggatcggctgatgaatcctctgatcgaccagtacctgtattatctaaacagaacacaaacagctagtggaactcagcagtctcggctactgtttagccaagctggacccacaagcatgtctcttcaagctaaaaactggctgcctggaccgtgttatcgccagcagcgtttgtcaaagcaggcaaacgacaacaacaacagcaactttccctggactggagctaccaagtactacctcaatggcagagactctttggtgaacccgggcccggccatggccagccacaaggacgatgaagaaaagtttttccccatgcatggaaccctaatatttggtaaagaaggaacaaatgctaccaacgcggaattggaaaatgtcatgattacagatgaagaggaaatcaggaccaccaatcccgtggctacagagcagtacggatatgtgtcaaataatttgcaaaactcaaatactgctgcaagtactgaaactgtgaatcaccaaggagcattacctggtatggtgtggcaggatcgagacgtgtacctgcagggacccatttgggccaagattcctcacaccgatggacactttcatccttctccactgatgggaggttttggactcaaacacccgcctcctcagattatgatcaaaaacactcccgttccagccaatcctcccacaaacttcagttctgccaagtttgcttccttcatcacacagtattccacgggacaggtcagcgtggagatcgagtgggagctgcagaaggagaacagcaaacgctggaatcccgaaattcagtacacttccaactacaacaaatctgttaatgtggactttactgtggacactaatggtgtgtattcagagcctcgccccattggcaccagatacctgactcgtaatctgtaattgcttgttaatcaataaaccgtttaattcgtttcagttgaactttggtctctgcgaagggcgaattcgcggccgctaaatcaatcg

SEQ ID NO: 293 - protein, 734 aa, Adeno-associated virus
MAADGYLPDWLEDTLSEGIRQWWKLKPGPPPPKPAERHKDDSRGLVLPGYKYLGPFNGLDKGEPVNEADAAALEHDKAYDRQLDSGDNPYLKYNHADAEFQERLKEDTSFGGNLGRAVFQAKKRVLEPLGLVEEPVKTAPGKKRPVEHSPAEPDSSSGTGKAGQQPARKRLNFGQTGDADSVPDPQPLGQPPAAPTSLGSTTMATGSGAPMADNNEGADGVGNSSGNWHCDSQWLGDRVITTSTRTWALPTYNNHLYKQISSQSGASNDNHYFGYSTPWGYFDFNRFHCRFSPRDWQRLINNNWGFRPKRLNFKLFNIQVKEVTQNDGTTTIANNLTSTVQVFTDSEYQLPYVLGSAHQGCLPPFPADVFMVPQYGYLTLNNGSQAVGRSSFYCLEYFPSQMLRTGNNFQFSYTFEDVPFHSSYAHSQGLDRLMNPLIDQYLYYLNRTQTASGTQQSRLLFSQAGPTSMSLQAKNWLPGPCYRQQRLSKQANDNNNSNFPWTGATKYHLNGGDSLVNPGPAMASHKDDEEKFFPMHGTLIFGKEGTNATNAELENVMITDEEEIRTTNPVATEQYGYVSNNLQNSNTAASTETVNHQGALPGMVWQDRDVYLRGPIWAKIPHADGHFHPSPLMGGFGLKHPPPQIMIKNTPVPANPPTNFSSAKFASFITQYSTGQVSVEIEWELQKENSKRWNPEIQYTSNYNKSVNVDFTVDTNGVYSEPRPIGTRYLTRNL

SEQ ID NO: 294 - DNA, 3157 bp, Adeno-associated virus
ctcactaagggactagtcctgcaggtttaaacgaattcgcccttgctgcgtcaactggaccaatgagaactttcccttcaacgactgtgtcgacaagatggtgatttggtgggaggaggggaagatgaccgccaaggtcgtggagtcggccaaagccactctcggaggaagcaaggtgcgcgtggaccagaaacgcaagtcctcggcccagatagatccgactcccgtgatcgtcacctccaacaccaacatgtgcgccgtgattgacgggaactcaacgaccttcgaacaccagcagccgttgcaagaccgaatgttcaaatttgaactcacccgccgtctggatcatgacttcgggaaggtcaccaagcaggaagtcaaagactttttccggtgggcaaaggatcacgtggttgaggtggagcatgaattctacgtcaaaaagggtggagccaagaaaagacccgcccctagtgacgcagatataagtgagcccaaacgggtgcgcgagtcagttgcgcagccatcgacgtcagacgcggaagcttcgatcaactacgcggacaggtaccaaaacaaatgttctcgtcacgtgggcatgaatctgatgctgtttccctgcagacaatgcgagagaatgaatcaaaattcaaatatctgcttcactcacggacagaaagactgtttagagtgctttcccgtgtcagaatctcaacctgtttctgtcgtcaaaaaggcgtatcagaaactgtgctacattcatcatatcatgggaaaggtgccagacgcttgcactgcctgcgatctggtcaatgtggatttggatgactgcatctctgaacaataaatgatttaaatcaggtatggctgccgatggttatcttccagattggctcgaggacactctctctgaaggaataagacagtggtggaagctcaaacctggcccaccaccaccaaagcccgcagagcggcataaggacgacagcaggggtcttgtgcttcctgggtacaagtacctcggacccttcaacggactcgacaagggagagccggtcaacgaggcagacgccgcggctctcgagcacgacaaggcctacgaccggcagctcgacagcggagacaacccgtacctcaagtacaaccacgccgacgcggagtttcaggagcgtcttaaagaagatacgtcttttgggggcaacctcggacgagcagtcttccaggcgaaaaagagggttcttgaacctctgggcctggttgaggaacctgttaagacggctccgggaaaaaagaggccggtagagcactctcctgcggagccagactcctcctcgggaaccggaaaagcgggccagcagcctgcaagaaaaagactgaatttcggtcagactggagacgcagactccgtacctgacccccagcctctcggacagccaccagcagcccccacaagtttgggatctactacaatggctacaggcagtggcgcaccaatggcagacaataacgagggtgccgatggagtgggtaattcctcaggaaattggcattgcgattcccaatggctgggcgacagagtcatcaccaccagcacccgaacctgggccctgcccacctacaacaaccacctttacaagcaaatctccagccaatcaggagcctcaaacgacaaccactactttggctacagcaccccctgggggtattttgacttcaacagattccactgccgcttttcaccacgtgactggcaaagactcatcaacaacaactggggattccgacccaagagactcaacttcaagctctttaacattcaagtcaaagaggtcacgcagaatgacggtacgacgacgattgccaataaccttaccagcacggttcaggtgtttactgactcggagtaccagctcccgtacgtcctcggctcggcgcatcaaggatgcctcccgccgtttccagcggacgtcttcatggtcccacagtatggatacctcaccctgaacaacgggagtcaggcggtaggacgctcttccttttactgcctggagtactttccttctcagatgctgcgtactggaaacaactttcagttcagctacacttttgaagacgtgcctttccacagcagctacgctcacagccagggtttggatcggctgatgaatcctctgatcgaccagtacctgtattatctaaacagaacacaaacagctagtggaactcagcagtctcggctactgtttagccaagctggacccacaagcatgtctcttcaagctaaaaactggctgcctggaccgtgttatcgccagcagcgtttgtcaaagcaggcaaacgacaacaacaacagcaactttccctggactggagctaccaagtaccacctcaatggcggagactctttggtgaacccgggcccggccatggccagccacaaggacgatgaagaaaagtttttccccatgcatggaaccctaatatttggtaaagaaggaacaaatgctaccaacgcggaattggaaaatgtcatgattacagatgaagaggaaatcaggaccaccaatcccgtggctacagagcagtacggatatgtgtcaaataatttgcaaaactcaaatactgctgcaagtactgaaactgtgaatcaccaaggagcattacctggtatggtgtggcaggatcgagacgtgtacctgcggggacccatttgggccaagattcctcacgccgatggacactttcatccttctccactgatgggaggttttggactcaaacacccgcctcctcagattatgatcaaaaacactcccgttccagccaatcctcccacaaacttcagttctgccaagtttgcttccttcatcacacagtattccacgggacaggtcagcgtggagatcgagtgggagctgcagaaggagaacagcaaacgctggaatcccgaaattcagtacacttccaactacaacaaatctgttaatgtggactttactgtggacactaatggtgtgtattcagagcctcgccccattggcaccagatacctgactcgtaatctgtaattgcttgttaatcaataaaccgtttaattcgtttcagttgaactttggtctctgcgaagggcgaattcgcggccgctaaattcaattcg

SEQ ID NO: 295 - protein, 734 aa, Adeno-associated virus
MAADGYLPDWLEDTLSEGIRQWWKLKPGPPPPKPAERHKDDSRGLVLPGYKYLGPFNGLDKGEPVNEADAAALEHDKAYDRQLDSGDNPYLKYNHADAEFQERLKEDTSFGGNLGRAVFQAKKRVLEPLGLVEEPVKTAPGKKRPVEHSPAEPDSSSGTGKAGQQPARKRLNFGQTGDADSVPDPQPLGQPPAAPTSLGSTTMATGSGAPMADNNEGADGVGNSSGNWHCDSQWLGDRVITTSTRTWALPTYNNHLYKQISSQSGASNDNHYFGYSTPWGYFDFNRFHCHFSPRDWQRLINNNWGFRPKRLNFKLFNIQVKEVTQNDGTTTIANNLTSTVQVFTDSEYQLPYVLGSAHQGCLPPFPADVFMVPQYGYLTLNNGSQAVGRSSFYCLECFPSQMLRTGNNFQFSYTFEDVPFHSSYAHSQSLDRLMNPLIDQYLYYLNRTQTASGTQQSRLLFSQAGPTSMSLQAKNWLPGPCYRQQRLSKQANDNNNSNFPWTGATKYHLNGRDSLVNPGPAMASHKDDEEKFFPMHGTLIFGKEGTNATNAELENVMITDEEEIRTTNPVATEQYGYVSNNLQNSNTAASTETVNHQGALPGMVWQDRDVYLQGPIWAKIPHTDGHFHPSPLMGGFGLKHPPPQIMIKNTPVPANPPTNFSSAKFASFITQYSTGQVSVEIEWELQKENSKRWNPEIQYTSNYNKSVNVDFTVDTNGVYSEPRPIGTRYLTRNL

SEQ ID NO: 296 - DNA, 2208 bp, Adeno-associated virus
atggctgccgatggttatcttccagattggctcgaggacactctctctgaaggaataagacagtggtggaagctcaaacctggcccaccaccaccaaagcccgcagagcggcataaggacgacagcaggggtcttgtgcttcctggatacaagtacctcggacccttcaacggactcgacaagggagagccggtcaacgaggcagacgccgcggccctcgagcacgacaaggcctacgaccggcagctcgacagcggagacaacccgtacctcaagtacaaccacgccgacgcggagtttcaggagcgccttaaagaagatacgtcttttgggggcaacctcggacgagcagtcttccaggcgaaaaagagggttcttgaacctctgggcctggttgaggaacctgttaagacggctccgggaaaaaagaggccggtagagcactctcctgtggagccagactcctcctcgggaaccggaaaagcgggcaaccagcctgcaagaaaaagattgaatttcggtcagactggagacgcagactccgtacctgacccccagcctctcggacagccaccagcatccccctctggtctgggaactaatacgatggctacaggcagtggcgcaccaatggcagacaataacgagggcgccgacggagtgggtaattcctcgggaaattggcattgcgattccacatggatgggcgacagagtcgtcaccaccagcacccgcacctgggccctgcccacctacaacaaccacctctacaagcagatttccagccaatcaggagccagcaacgacaaccactactttggctacagcaccccttgggggtattttgacttcaacagattccactgccacttttcgccacgcgactggcagagactcatcaacaacaactggggattccggcccaaaagactcaacttcaagctgtttaacattcaagtcaaggaggtcacgcagaatgacggtacgacgacgattgccaataaccttaccagcacggttcaggtgtttactgacttggagtaccagctcccgtacgtcctcggctcggcgcatcaaggatgcctcccgccgttcccagcagacgtcttcatggtgccacagtatggatacctcaccctgaacaacgggagtcaggcggtaggacgctcttccttttactgcctggagtactttccttctcagatgcttcgcaccggaaacaactttaccttcagctacacttttgaagacgttcctttccacagcagctacgctcacagtcaaagtctggaccgtctcatgaatcctctcatcgaccagtacctgtattacttgagcagaacaaacactccaagcggaaccactacgcagtccaggcttcagttttctcaggccggagcgagtgacattcgggaccagtctaggaactggcttcctggaccctgttaccgccagcagcgagtatcaaagacagctgcggataacaacaacagtgaatactcgtggactggagctaccaagtaccacctcaatggcagagactctctggtgaatccgggcccggccatggccagccacaaggacgatgaagaaaagttttttcctcaaagcggggttctcatctttgggaagcaaggctcagagaaaacaaatgtggacattgaaaaggtcatgattacagacgaagaggaaatcaggaccaccaatcccgtggctacggagcagtatggttctgtatctaccaacctccagagcggcaacacacaagcagctacctcagatgtcaacacacaaggcgttcttccaggcatggtctggcaggacagagacgtgtacctgcaggggcccatctgggcaaaaattccacacacggacggacattttcacccctctcccctcatgggcggatttggacttaaacaccctcctccacagattctcattaagaataccccggtacctgcgaatccttcgaccaccttcagcgcggcaaagtttgcttccttcatcacacagtattccacggggcaggtcagcgtggagatcgagtgggagctgcagaaggagaacagcaaacgctggaatcccgaaattcagtacacttccaactacaacaaatctgttaatgtggactttactgtggacactaatggggtgtattcagagcctcgccctattggcaccagatacctgactcgtaatctgtaa

SEQ ID NO: 297 - DNA, 3159 bp, Adeno-associated virus
gattgatttagcggccgcgaattcgcccttgctgcgtcaactggaccaatgagaactttcccttcaacgattgcgtcgacaagatggtgatctggtgggaggagggaaagatgaccgccaaggtcgtggagtcggccaaagccattctcggaggaagcaaggtgcgtgtggaccaaaagtgcaagtcttcggcccagatcgacccgactcccgtgatcgtcacctccaacaccaacatgtgcgccgtgattgatggaaactcaacgaccttcgagcaccagcagccgttgcaagaccggatgttcaaatttgaacttacccgccgtctggatcatgactttggaaaggtcaccaagcaggaagtgaaagactttttccggtgggcaaaggatcacgtggttgaggtggagcatgagttctacgtcaaaaagggtggagccaaaaaaagacccgcccccagtgacgcagatataagtgagcccaaacgggcgcgcgagtcagttgcgcagccatcgacgtcagacgcggaagcttcgatcaactacgcggacaggtaccaaaacaaatgttctcgtcacgtgggcatgaatctgatgctgtttccctgcagacaatgcgagagaatgaatcagaattcaaatatctgcttcactcacggacagaaagactgtccatagtgctttcccgtgtcagaatctcaacccgtttctgtcgtcaaaaaggcgtatcagaaactgtgctacattcatcacatcatgggaaaggtgccagacgcttgcactgcttgcgacctggtcaatgtggatttggatgactgcatctctgaacaataaatgatttaaatcaggtatggctgccgatggttatcttccagattggctcgaggacactctctctgaaggaataagacagtggtggaagctcaaacctggcccaccaccaccaaagcccgcagagcggcataaggacgacagcaggggtcttgtgcttcctggatacaagtacctcggacccttcaacggactcgacaagggagagccggtcaacgaggcagacgccgcggccctcgagcacgacaaggcctacgaccggcagctcgacagcggagacaacccgtacctcaagtacaaccacgccgacgcggagtttcaggagcgccttaaagaagatacgtcttttgggggcaacctcggacgagcagtcttccaggcgaaaaagagggttcttgaacctctgggcctggttgaggaacctgttaagacggctccgggaaaaaagaggccggtagagcactctcctgtggagccagactcctcctcgggaaccggaaaagcgggcaaccagcctgcaagaaaaagattgaatttcggtcagactggagacgcagactccgtacctgacccccagcctctcggacagccaccagcatccccctctggtctgggaactaatacgatggctacaggcagtggcgcaccaatggcagacaataacgagggcgccgacggagtgggtaattcctcgggaaattggcattgcgattccacatggatgggcgacagagtcgtcaccaccagcacccgcacctgggccctgcccacctacaacaaccacctctacaagcagatttccagccaatcaggagccagcaacgacaaccactactttggctacagcaccccttgggggtattttgacttcaacagattccactgccacttttcgccacgcgactggcagagactcatcaacaacaactggggattccggcccaaaagactcaacttcaagctgtttaacattcaagtcaaggaggtcacgcagaatgacggtacgacgacgattgccaataaccttaccagcacggttcaggtgtttactgacttggagtaccagctcccgtacgtcctcggctcggcgcatcaaggatgcctcccgccgttcccagcagacgtcttcatggtgccacagtatggatacctcaccctgaacaacgggagtcaggcggtaggacgctcttccttttactgcctggagtactttccttctcagatgcttcgcaccggaaacaactttaccttcagctacacttttgaagacgttcctttccacagcagctacgctcacagtcaaagtctggaccgtctcatgaatcctctcatcgaccagtacctgtattacttgagcagaacaaacactccaagcggaaccactacgcagtccaggcttcagttttctcaggccggagcgagtgacattcgggaccagtctaggaactggcttcctggaccctgttaccgccagcagcgagtatcaaagacagctgcggataacaacaacagtgaatactcgtggactggagctaccaagtaccacctcaatggcagagactctctggtgaatccgggcccggccatggccagccacaaggacgatgaagaaaagttttttcctcaaagcggggttctcatctttgggaagcaaggctcagagaaaacaaatgtggacattgaaaaggtcatgattacagacgaagaggaaatcaggaccaccaatcccgtggctacggagcagtatggttctgtatctaccaacctccagagcggcaacacacaagcagctacctcagatgtcaacacacaaggcgttcttccaggcatggtctggcaggacagagacgtgtacctgcaggggcccatctgggcaaaaattccacacacggacggacattttcacccctctcccctcatgggcggatttggacttaaacaccctcctccacagattctcattaagaataccccggtacctgcgaatccttcgaccaccttcagcgcggcaaagtttgcttccttcatcacacagtattccacggggcaggtcagcgtggagatcgagtgggagctgcagaaggagaacagcaaacgctggaatcccgaaattcagtacacttccaactacaacaaatctgttaatgtggactttactgtggacactaatggggtgtattcagagcctcgccctattggcaccagatacctgactcgtaatctgtaattgcttgttaatcaataaaccgtttaattcgtttcagttgaactttggtctctgcgaagggcgaattcgtttaaacctgcaggactagtccctttagtgagg

SEQ ID NO: 298 - protein, 735 aa, Adeno-associated virus
MAADGYLPDWLEDTLSEGIRQWWKLKPGPPPPKPAERHKDDSRGLVLPGYKYLGPFNGLDKGEPVNEADAAALEHDKAYDRQLDSGDNPYLKYNHADAEFQERLKEDTSFGGNLGRAVFQAKKRVLEPLGLVEEPVKTAPGKKRPVEHSPVEPDSSSGTGKAGNQPARKRLNFGQTGDADSVPDPQPLGQPPASPSGLGTNTMATGSGAPMADNNEGADGVGNSSGNWHCDSTWMGDRVVTTSTRTWALPTYNNHLYKQISSQSGASNDNHYFGYSTPWGYFDFNRFHCHFSPRDWQRLINNNWGFRPKRLNFKLFNIQVKEVTQNDGTTTIANNLTSTVQVFTDLEYQLPYVLGSAHQGCLPPFPADVFMVPQYGYLTLNNGSQAVGRSSFYCLEYFPSQMLRTGNNFTFSYTFEDVPFHSSYAHSQSLDRLMNPLIDQYLYYLSRTNTPSGTTTQSRLQFSQAGASDIRDQSRNWLPGPCYRQQRVSKTAADNNNSEYSWTGATKYHLNGRDSLVNPGPAMASHKDDEEKFFPQSGVLIFGKQGSEKTNVDIEKVMITDEEEIRTTNPVATEQYGSVSTNLQSGNTQAATSDVNTQGVLPGMVWQDRDVYLQGPIWAKIPHTDGHFHPSPLMGGFGLKHPPPQILIKNTPVPANPSTTFSAAKFASFITQYSTGQVSVEIEWELQKENSKRWNPEIQYTSNYNKSVNVDFTVDTNGVYSEPRPIGTRYLTRNL

SEQ ID NO: 299 - DNA, 2205 bp, Adeno-associated virus
atggctgccgatggttatcttccagattggctcgaggacactctctctgaaggaataagacagtggtggaagctcaaacctggcccaccaccaaagcccgcagagcggcataaggacgacagcaggggtcttgtgcttcctggatacaagtacctcggacccttcaacggactcgacaagggagagccggtcaacgaggcagacgccgcggccctcgagcacgacaaggcctacgaccggcagctcgacagcggagacaacccgtacctcaagtacaaccacgccgacgcggagtttcaggagcgccttaaagaagatacgtcttttgggggcaacctcggacgagcagtcttccaggcgaaaaagagggttcttgaacctctgggcctggttgaggaacctgttaagacggctccgggaaaaaagaggcccgtagagcactctcctgtggagccagactcctcctcgggaaccggaaaagcgggcaaccagcctgcaagaaaaagattgaatttcggtcagactggagacgcagactccgtacctgacccccagcctctcggacagccaccagcagccccctctggtctgggaactaatacgatggctacaggcagtggcgcaccaatggcagacaataacgagggcgccgacggagtgggtaattcctcgggagattggcattgcgattccacatggatgggcgacagagtcatcaccaccagcacccgcacctgggccctgcccacctacaacaaccacctctacaagcagatttccagccaatcaggagccagcaatgacaaccactactttggctacagcaccccttgggggtattttgacttcaacagattccactgccacttttcgccacgcgactggcagagactcatcaacaacaactggggattccggcccaaaagactcaacctcaagctgtttaacattcaagtcaaggaggtcacgcagaatgacggtacgacgacgattgccaataaccttaccagcacggttcaggtgtttactgacttggagtaccagctcccgtacgtcctcggctcggcgcatcaaggatgcctcccgccgttcccagcagacgtcttcatggtgccacagtatggatacctcaccctgaacaacgggagtcaggcggtaggacgctcttccttttactgcctggagtactttccttctcagatgcttcgtaccggaaacaactttaccttcagctacacttttgaagacgttcctttccacagcagctacgctcacagtcaaagtctggaccgtctcatgaatcctctcatcgaccagtacctgtattacttgagcagaacaaacactccaagcggaaccactacgcagtccaggcttcagttttctcaggccggagcgagtgacattcgggaccagtctaggaactggcttcctggaccctgttaccgccagcagcgagtatcaaagacagctgcggataacaacaacggtgaatactcgtggactggagctaccaagtaccacctcaatggcagagactctctggtgaatccgggcccggccatggccagccacaaggacgatgaagaaaagttttttcctcaaagcggggttctcatctttgggaagcaaggctcagagaaaacaaatgtggacattgaaaaggtcatgattacagacgaagaggaaatcaggaccaccaatcccgtggctacggagcagtatggttctgtatctaccaacctccagagcggcaacacacgagcagctacctcagatgtcaacacacaaggcgttcttccaggcatggtctggcaggacagagacgtgtacctgcaggggcccatctgggcaaaaattccacacacggacggacattttcacccctctcccctcatgggcggatttggacttaaacaccctcctccacagattctcattaagaataccccggtacctgcgaatccttcgaccaccttcagcgcggcaaagtttgcttccttcatcacacagtattccacggggcaggtcagcgtggagatcgagtgggagctgcagaaggagaacagcaaacgctggaatcccgaaattcagtacacttccaactacaacaaatctgttaatgtggactttactgtggacactaatggggtgtattcagagcctcgccctattggcaccagatacctgactcgtaatctgtaa

SEQ ID NO: 300 - DNA, 3156 bp, Adeno-associated virus
cgattgaatttagcggccgcgaattcgcccttgctgcgtcaacggaccaatgagaactttcccttcaacgattgcgtcgacaagatggtgatctggtgggaggagggaaagatgaccgccaaggtcgtggagtcggccaaagccattctcggaggaagcaaggtgcgtgtggaccaaaagtgcaagtcttcggcccagatcgacccgactcccgtgatcgtcacctccaacaccaacatgtgcgccgtgattgatggaaactcaacgaccttcgagcaccagcagccgttgcaagaccggatgttcaaatttgaacttacccgccgtctggatcatgactttggaaaggtcaccaagcaggaagtgaaagactttttccggtgggcaaaggatcacgtggttgaggtggagcatgagttctacgtcaaaaagggtggagccaaaaaaagacccgcccccagtgacgcagatataagtgagcccaaacgggcgcgcgagtcagttgcgcagccatcgacgtcagacgcggaagcttcgatcaactacgcggacaggtaccaaaacaaatgttctcgtcacgtgggcatgaatctgatgctgtttccctgcagacaatgcgagcgaatgaatcagaattcaaatatctgcttcactcacggacagaaagactgtttagagtgctttcccgtgtcagaatctcaacccgtttctgtcgtcaaaaaggcgtatcagaaactgtgctacattcatcacatcatgggaaaggtgccagacgcttgcactgcttgcgacctggtcaatgtggatttggatgactgcatctctgaacaataaatgatttaaatcaggtatggctgccgatggttatcttccagattggctcgaggacactctctctgaaggaataagacagtggtggaagctcaaacctggcccaccaccaaagcccgcagagcggcataaggacgacagcaggggtcttgtgcttcctggatacaagtacctcggacccttcaacggactcgacaagggagagccggtcaacgaggcagacgccgcggccctcgagcacgacaaggcctacgaccggcagctcgacagcggagacaacccgtacctcaagtacaaccacgccgacgcggagtttcaggagcgccttaaagaagatacgtcttttgggggcaacctcggacgagcagtcttccaggcgaaaaagagggttcttgaacctctgggcctggttgaggaacctgttaagacggctccgggaaaaaagaggcccgtagagcactctcctgtggagccagactcctcctcgggaaccggaaaagcgggcaaccagcctgcaagaaaaagattgaatttcggtcagactggagacgcagactccgtacctgacccccagcctctcggacagccaccagcagccccctctggtctgggaactaatacgatggctacaggcagtggcgcaccaatggcagacaataacgagggcgccgacggagtgggtaattcctcgggagattggcattgcgattccacatggatgggcgacagagtcatcaccaccagcacccgcacctgggccctgcccacctacaacaaccacctctacaagcagatttccagccaatcaggagccagcaatgacaaccactactttggctacagcaccccttgggggtattttgacttcaacagattccactgccacttttcgccacgcgactggcagagactcatcaacaacaactggggattccggcccaaaagactcaacctcaagctgtttaacattcaagtcaaggaggtcacgcagaatgacggtacgacgacgattgccaataaccttaccagcacggttcaggtgtttactgacttggagtaccagctcccgtacgtcctcggctcggcgcatcaaggatgcctcccgccgttcccagcagacgtcttcatggtgccacagtatggatacctcaccctgaacaacgggagtcaggcggtaggacgctcttccttttactgcctggagtactttccttctcagatgcttcgtaccggaaacaactttaccttcagctacacttttgaagacgttcctttccacagcagctacgctcacagtcaaagtctggaccgtctcatgaatcctctcatcgaccagtacctgtattacttgagcagaacaaacactccaagcggaaccactacgcagtccaggcttcagttttctcaggccggagcgagtgacattcgggaccagtctaggaactggcttcctggaccctgttaccgccagcagcgagtatcaaagacagctgcggataacaacaacggtgaatactcgtggactggagctaccaagtaccacctcaatggcagagactctctggtgaatccgggcccggccatggccagccacaaggacgatgaagaaaagttttttcctcaaagcggggttctcatctttgggaagcaaggctcagagaaaacaaatgtggacattgaaaaggtcatgattacagacgaagaggaaatcaggaccaccaatcccgtggctacggagcagtatggttctgtatctaccaacctccagagcggcaacacacgagcagctacctcagatgtcaacacacaaggcgttcttccaggcatggtctggcaggacagagacgtgtacctgcaggggcccatctgggcaaaaattccacacacggacggacattttcacccctctcccctcatgggcggatttggacttaaacaccctcctccacagattctcattaagaataccccggtacctgcgaatccttcgaccaccttcagcgcggcaaagtttgcttccttcatcacacagtattccacggggcaggtcagcgtggagatcgagtgggagctgcagaaggagaacagcaaacgctggaatcccgaaattcagtacacttccaactacaacaaatctgttaatgtggactttactgtggacactaatggggtgtattcagagcctcgccctattggcaccagatacctgactcgtaatctgtaattgcttgttaatcaataaaccgtttaattcgtttcagttgaactttggtctctgcgaagggcgaattcgtttaaacctgcaggactagtccctttagtgag

SEQ ID NO: 301 - protein, 734 aa, Adeno-associated virus
MAADGYLPDWLEDTLSEGIRQWWKLKPGPPPKPAERHKDDSRGLVLPGYKYLGPFNGLDKGEPVNEADAAALEHDKAYDRQLDSGDNPYLKYNHADAEFQERLKEDTSFGGNLGRAVFQAKKRVLEPLGLVEEPVKTAPGKKRPVEHSPVEPDSSSGTGKAGNQPARKRLNFGQTGDADSVPDPQPLGQPPAAPSGLGTNTMATGSGAPMADNNEGADGVGNSSGDWHCDSTWMGDRVITTSTRTWALPTYNNHLYKQISSQSGASNDNHYFGYSTPWGYFDFNRFHCHFSPRDWQRLINNNWGFRPKRLNLKLFNIQVKEVTQNDGTTTIANNLTSTVQVFTDLEYQLPYVLGSAHQGCLPPFPADVFMVPQYGYLTLNNGSQAVGRSSFYCLEYFPSQMLRTGNNFTFSYTFEDVPFHSSYAHSQSLDRLMNPLIDQYLYYLSRTNTPSGTTTQSRLQFSQAGASDIRDQSRNWLPGPCYRQQRVSKTAADNNNGEYSWTGATKYHLNGRDSLVNPGPAMASHKDDEEKFFPQSGVLIFGKQGSEKTNVDIEKVMITDEEEIRTTNPVATEQYGSVSTNLQSGNTRAATSDVNTQGVLPGMVWQDRDVYLQGPIWAKIPHTDGHFHPSPLMGGFGLKHPPPQILIKNTPVPANPSTTFSAAKFASFITQYSTGQVSVEIEWELQKENSKRWNPEIQYTSNYNKSVNVDFTVDTNGVYSEPRPIGTRYLTRNL

SEQ ID NO: 302 - DNA, 2208 bp, Adeno-associated virus
atggctgccgatggttatcttccagattggctcgaggacactctctctgaaggaataagacagtggtggaagctcaaacctggcccaccaccaccaaagcccgcagagcggcataaggacgacagcaggggtcttgtgcttcctgggtacaagtacctcggacccttcaacggactcgacaagggagagccggtcaacgaggcagacgccgcggccctcgagcacgacaaggcctacgaccggcagctcgacagcggagacaacccgtacctcaagtacgaccacgccgacgcggagtttcaggagcgccttaaagaagatacgtcttttgggggcaacctcggacgagcagtcttccaggcaaaaaagagggttcttgaacctctgggcctggttgaggagcctgttaagacggctccgggaaaaaagaggccggtagagcactctcctgtggagccagactcctcctcgggaaccggaaaagcgggcaaccagcctgcaagaaagagattgaatttcggtcagactggagacgcagactccgtacctgacccccagcctctcggacagccaccagcagccccctctggtctgggaactaatacgatggctacaggcagtggcgcaccaatggcagacaataacgatggcgccgacggagtgggtaattcctcgggaaattggcattgcgattccacatggatgggcgacagagtcatcaccaccagcacccgaacctgggctctgcccacctacaacaaccatctgtacaagcagatttccagccaatcaggagccagcaacgacaaccactactttggctacagcaccccttgggggtattttgacttcaacagattccactgccacttttcaccacgtgactggcaaagactcatcaacaacaactggggattccggcccaagagactcaacttcaagctctttaacattcaagtcagagaggtcacgcagaatgatggtacgacgacgattgccaataaccttaccagcacggttcaggtgtttactgactcggagtaccagctcccgtacgtcctcggctcggcgcatcaaggatgcctcccgccgttcccagcagacgtcttcatggtgccacagtatggatacctcaccctgaacaacgggagtcaggcagtaggacgctcttcattttactgcctggagtacttcccttctcagatgctgcgtaccggaaacaactttaccttcagctacacctttgaggatgttcctttccacagcagctacgctcacagccagagtttggaccgtctcatgaatcctctcatcgaccagtacctgtattacttgagcagaacaaacactccaagcggaaccaccacgcagtccaggcttcagttttctcaggccggagcgagtgacattcgggatcagtctaggaactggcttcctggaccctgttaccgccagcagcgagtatcaaagacatctgcggacaacaacaacagtgaatactcgtggattggagctaccaagtaccacctcaatggcagagactctctggtgaatccgggcccggcaatggccagccacaaggacgatgaagaaaagttttttcctcagagcggggttctcatctttggaaaacaaggatcagagaaaacaaatgtggacattgaaaaggtcatgattacagacgaagaggaaatcagaaccaccaatcccgtggccacggagcagtatggttctgtatctaccaacctccagagcggcaacacacaagcatctactgcagatgtcaacacacaaggcgttcttccaggcatggtctggcaggacagagacgtgtacctgcaggggcctatctgggcaaagattccgcacacggacggacattttcacccctctcccctcatgggcggattcggacttaaacaccctcctccacagattctcatcaaaaacaccccggtacctgcgaatccttcgaccaccttcagtgcggcaaagtttgcttccttcatcacacagtattccacggggcgggtcagcgtggagatcgagtgggagctacagaaggagaacagcaaacgctggaatcccgagatccagtacacttccaactacaacaaatctgttaatgtggactttactgtggacactaatggtgtgtattcagagcctcgccccattggcaccagatacctgactcgtaatctgtaa

SEQ ID NO: 303 - protein, 735 aa, Adeno-associated virus
MAADGYLPDWLEDTLSEGIRQWWKLKPGPPPPKPAERHKDDSRGLVLPGYKYLGPFNGLDKGEPVNEADAAALEHDKAYDRQLDSGDNPYLKYDHADAEFQERLKEDTSFGGNLGRAVFQAKKRVLEPLGLVEEPVKTAPGKKRPVEHSPVEPDSSSGTGKAGNQPARKRLNFGQTGDADSVPDPQPLGQPPAAPSGLGTNTMATGSGAPMADNNDGADGVGNSSGNWHCDSTWMGDRVITTSTRTWALPTYNNHLYKQISSQSGASNDNHYFGYSTPWGYFDFNRFHCHFSPRDWQRLINNNWGFRPKRLNFKLFNIQVREVTQNDGTTTIANNLTSTVQVFTDSEYQLPYVLGSAHQGCLPPFPADVFMVPQYGYLTLNNGSQAVGRSSFYCLEYFPSQMLRTGNNFTFSYTFEDVPFHSSYAHSQSLDRLMNPLIDQYLYYLSRTNTPSGTTTQSRLQFSQAGASDIRDQSRNWLPGPCYRQQRVSKTSADNNNSEYSWIGATKYHLNGRDSLVNPGPAMASHKDDEEKFFPQSGVLIFGKQGSEKTNVDIEKVMITDEEEIRTTNPVATEQYGSVSTNLQSGNTQASTADVNTQGVLPGMVWQDRDVYLQGPIWAKIPHTDGHFHPSPLMGGFGLKHPPPQILIKNTPVPANPSTTFSAAKFASFITQYSTGRVSVEIEWELQKENSKRWNPEIQYTSNYNKSVNVDFTVDTNGVYSEPRPIGTRYLTRNL

SEQ ID NO: 304 - DNA, 2217 bp, Adeno-associated virus
atggctgccgatggttatcttccagattggctcgaggacaacctctctgagggcattcgcgagtggtgggacttgaaacctggagccccgaaacccaaagccaaccagcaaaagcaggacgacggccggggtctggtgcttcctggctacaagtacctcggacccttcaacggactcgacaagggggagcccgtcaacgcggcggacgcagcggccctcgagcacgacaaggcctacgaccagcagctcaaagcgggtgacaatccgtacctgcggtataaccacgccgacgccgagtttcaggagcgtctgcaagaagatacgtcttttgggggcaacctcgggcgagcagtcttccaggccaagaagcgggttctcgaacctctcggtctggttgaggaaggcgctaagacggctcctggaaagaagagaccggtagagccatcaccccagcgttctccagactcctctacgggcatcggcaagacaggccagcagcccgcgaaaaagagactcaactttgggcagactggcgactcagagtcagtgcccgaccctcaaccaatcggagaaccccccgcaggcccctctggtctgggatctggtacaatggctgcaggcggtggcgctccaatggcagacaataacgaaggcgccgacggagtgggtagttcctcaggaaattggcattgcgattccgcatggctgggcgacagagtcatcaccaccagcacccgaccctgggccctccccacctacaacaaccacctctacaagcaaatctccaacgggacatcgggaggaagcaccaacgacaacacctacttcggctacagcaccccctgggggtattttgactttaacagattccactgccacttctcaccacgtgactggcagcgactcatcaacaacaactggggattccggcccaagagactcaacttcaagctcttcaacatccaggtcaaggaggtcacgcagaatgaaggcaccaagaccatcgccaataaccttaccagcacgattcaggtctttacggactcggaataccagctcccgtacgtcctcggctctgcgcaccagggctgcccgcctccgttcccggcggacgtcttcatgattcctcagtacgggtacctgactctgaacaacggcagtcaggccgtgggccgttcctccttctactgcctggagtactttccttctcaaatgcggagaacgggcaacaactttgagttcagctaccagtttgaggacgtgccttttcacagcagctacgcgcatagccaaagcctggaccggctgatgaaccccctcatcgaccagtacctgtactacctgtctcggactcagtccacgggaggtaccgcaggaactcagcagttgctattttctcaggccgggcctaataacatgtcggctcaggccaaaaactggctacccgggccctgctaccggcagcaacgcgtctccacgacactgtcgcaaaataacaacagcaactttgcttggaccggtgccaccaagtatcatctgaatggcagagactctctggtaaatcccggtgtcgctatggcaacgcacaaggacgacgaagagcgattttttccatccagcggagtcttgatgtttgggaaacagggagctggaaaagacaacgtggactatagcagcgttatgctaaccagtgaggaagaaatcaaaaccaccaacccagtggccacagaacagtacggcgtggtggccgataacctgcaacagcaaaacgccgctcctattgtaggggccgtcaacagtcaaggagccttacctggcatggtctggcagaaccgggacgtgtacctgcagggtcctatctgggccaagattcctcacacggacggcaactttcatccttcgccgctgatgggaggctttggactgaaacacccgcctcctcagatcctgattaagaatacacctgttcccgcggatcctccaactaccttcagtcaagccaagctggcgtcgttcatcacgcagtacagcaccggacaggtcagcgtggaaattgaatgggagctgcagaaagagaacagcaagcgctggaacccagagattcagtatacttccaactactacaaatctacaaatgtggactttgctgtcaatactgagggtacttattcagagcctcgccccattggcacccgttacctcacccgtaacctgtaa

SEQ ID NO: 305 - protein, 738 aa, Adeno-associated virus
MAADGYLPDWLEDNLSEGIREWWDLKPGAPKPKANQQKQDDGRGLVLPGYKYLGPFNGLDKGEPVNAADAAALEHDKAYDQQLKAGDNPYLRYNHADAEFQERLQEDTSFGGNLGRAVFQAKKRVLEPLGLVEEGAKTAPGKKRPVEPSPQRSPDSSTGIGKTGQQPAKKRLNFGQTGDSESVPDPQPIGEPPAGPSGLGSGTMAAGGGAPMADNNEGADGVGSSSGNWHCDSAWLGDRVITTSTRPWALPTYNNHLYKQISNGTSGGSTNDNTYFGYSTPWGYFDFNRFHCHFSPRDWQRLINNNWGFRPKRLNFKLFNIQVKEVTQNEGTKTIANNLTSTIQVFTDSEYQLPYVLGSAHQGCPPPFPADVFMIPQYGYLTLNNGSQAVGRSSFYCLEYFPSQMRRTGNNFEFSYQFEDVPFHSSYAHSQSLDRLMNPLIDQYLYYLSRTQSTGGTAGTQQLLFSQAGPNNMSAQAKNWLPGPCYRQQRVSTTLSQNNNSNFAWTGATKYHLNGRDSLVNPGVAMATHKDDEERFFPSSGVLMFGKQGAGKDNVDYSSVMLTSEEEIKTTNPVATEQYGVVADNLQQQNAAPIVGAVNSQGALPGMVWQNRDVYLQGPIWAKIPHTDGNFHPSPLMGGFGLKHPPPQILIKNTPVPADPPTTFSQAKLASFITQYSTGQVSVEIEWELQKENSKRWNPEIQYTSNYYKSTNVDFAVNTEGTYSEPRPIGTRYLTRNL

SEQ ID NO: 306 - protein, 735 aa, Adeno-associated virus
MAADGYLPDWLEDTLSEGIRQWWKLKPGPPPPKPAERHKDDSRGLVLPGYKYLGPFNGLDKGEPVNEADAAALEHDKAYDRQLDSGDNPYLKYNHADAEFQERLKEDTSFGGNLGRAVFQAKKRVLEPLGLVEEPVKTAPGKKRPVEHSPVEPDSSSGTGKAGQQPARKRLNFGQTGDADSVPDPQPLGQPPAAPSGLGSTTMATGSGAPMADNNEGADGVGNSSGNWHCDSQWLGDRVITTSTRTWALPTYNNHLYKQISSQSGASNDNHYFGYSTPWGYFDFNRFHCHFSPRDWQRLINNNWGFRPKRLNFKLFNIQVKEVTQNDGTTTIANNLTSTVQVFTDSEYQLPYVLGSAHQGCLPPFPADVFMVPQYGYLTLNNGSQAVGRSSFYCLEYFPSQMLRTGNNFQFSYTFEDVPFHSSYAHSQSLDRLMNPLVDQYLYYLNKTQTNSGTLQQSRLLFSQAGPTNMSLQAKNWLPGPCYRQQRLSKQANDNNNSNFPWTAATKYHLNGRDSLVNPGPAMASHKDDEEKFFPMHGTLIFGKQGTNANDADLENVMITDEEEIRTTNPVATEQYGTVSNNLQNSNTGPTTGTVNHQGALPGMVWQDRDVYLQGPIWAKIPHTDGHFHPSPLMGGFGLKHPPPQIMIKNTPVPANPPTNFSSAKFASFITQYSTGQVSVEIEWELQKENSKRWNPEIQYTSNYNKSVNVDFTVDTNGVYSEPRPIGTRYLTRNL

SEQ ID NO: 307 - DNA, 3158 bp, Adeno-associated virus
gattgaatttagcggccgcgaattcgcccttgctgcgtcaactggaccaatgagaactttcctttcaatgattgcgtcgacaagatggtgatctggtgggaggagggaaagatgaccgccaaggtcgtggagtcggccaaagccattctcggaggaagcaaggtgcgcgcggaccagaaatgcaagtcctcggcccagatagacccgactcccgtgattgtcacctccaacaccaacatgtgcgccgtgattgacgggaactcaacgaccttcgaacaccagcagccgttgcaagaccggatgttcaaatttgaactcacccgccgtctggatcatgactttgggaaggtcaccaagcaggaagtcaaagactttttccggtgggcaaaggatcacgtggttgaggtggagcatgaattctacgtcaaaaagggtggagctaagaaaagacccgcccccagtgacgcagatataagtgagcccaaacgggcgcgcgagtcagttgcgcagccatcgacgtcagacgcggaagcttcgatcaactacgcgggcaggtaccaaaacaaatgttctcgtcacgtgggcatgaatctgatgctgtttccctgcagacaatgcgagagaatgaatcagaattcaaatatctgcttcactcacggacagaaagactgtttagagtgctttcccgtgtcagaatctcaacccgtttctgtcgtcaaaaaggcgtatcagaaactttgctacattcatcatatcatgggaaaggtgccagacgcttgcactgcctgcgatctggtcaatgtggatttggatgactgcatctctgaacaataaatgatttaaatcaggtatggctgccgatggttatcttccagattggctcgaggacactctctctgaaggaataagacagtggtggaagctcaaacctggcccaccaccaccaaagcccgcagagcggcataaggacgacagcaggggtcttgtgcttcctgggtacaagtacctcggacccttcaacggactcgacaagggggagccggtcaacgaggcagacgccgcggccctcgagcacgacaaggcctacgaccggcagctcgacagcggagacaacccgtacctcaagtacaaccacgccgacgcggagtttcaggagcgccttaaagaagatacgtcttttgggggcaacctcggacgagcagtcttccaggcaaaaaagagggttcttgaacctctgggcctggttgaggaacctgttaaaacggctccgggaaaaaagaggccggtagagcactctcctgtggagccagactcctcctcgggaaccggaaaagcgggccagcagcctgcaagaaaaagattgaatttcggtcagactggagacgcagactccgtacctgacccccagcctctcggacagccaccagcagccccctctggtctgggatctactacaatggctacaggcagtggcgcaccaatggcagacaataacgagggtgccgatggagtgggtaattcctcgggaaattggcattgcgattcccaatggctgggcgacagagtcatcaccaccagcacccgcacctgggccctgcccacctacaacaaccacctctacaagcaaatctccagccaatcaggagcctcaaacgacaaccactactttggctacagcaccccctgggggtattttgacttcaacagattccactgccacttttcaccacgtgactggcaaagactcatcaacaacaactggggattccgacccaagagactcaacttcaagctctttaacattcaagtcaaagaggtcacgcagaatgacggtacgacgacgattgccaataaccttaccagcacggttcaggtgtttactgactcggagtaccagctcccgtacgtcctcggctcggcgcatcaaggatgcctcccgccgtttccagcggacgtcttcatggtcccacagtatggatacctcaccctgaacaacgggagtcaggcagtaggacgctcttcattttactgcctggagtactttccttctcagatgctgcgtaccggaaacaactttcaattcagctacacttttgaagacgtgcctttccacagcagctacgctcacagccagagtctggatcggctgatgaatcctctggtcgaccagtacctgtattatctgaacaagacacaaacaaatagtggaactcttcagcagtctcggctactgtttagccaagctggacccaccaacatgtctcttcaagctaaaaactggctgcctggaccttgctacagacagcagcgtctgtcaaagcaggcaaacgacaacaacaacagcaactttccctggactgcagctacaaagtatcatctaaatggccgggactcgttggttaatccaggaccagctatggccagtcacaaggatgacgaagaaaagtttttccccatgcatggaacccttatatttggtaaacaaggaacaaatgccaacgacgcggatttggaaaatgtcatgattacagatgaagaagaaatcaggaccaccaatcccgtggctacggagcagtacggaactgtatcaaataatttgcaaaactcaaacactggtccaactactggaactgtcaatcaccaaggagcgttacctggtatggtgtggcaggatcgagacgtgtacctgcagggacccatttgggccaagattcctcacaccgatggacactttcatccttctccactgatgggaggttttggactcaaacacccacctcctcaaatcatgatcaaaaacactcccgttccagccaatcctcccacaaacttcagttctgccaagtttgcttctttcatcacacagtattccacggggcaggtcagcgtggagatcgagtgggagctgcagaaggagaacagcaaacgctggaatcccgaaattcagtacacttccaactacaacaaatctgttaatgtggactttactgtggacactaatggtgtgtattcagagcctcgccccattggcaccagatacctgactcgtaatctgtaattgcttgttaatcaataaaccgtttaattcgtttcagttgaactttggtctctgcgaagggcgaattcgtttaaacctgcaggactagtccctttagtga

SEQ ID NO: 308 - protein, 735 aa, Adeno-associated virus
MAADGYLPDWLEDTLSEGIRQWWKLKPGPPPPKPAERHKDDSRGLVLPGYKYLGPFNGLDKGEPVNEADAAALEHDKAYDRQLDSGDNPYLKYNHADAEFQERLKEDTSFGGNLGRAVFQAKKRVLEPLGLVEEPVKTAPGKKRPVEHPPVEPDSSSGTGKAGQQPARKRLNFGQTGDADSVPDPQPLGQPPAAPSGLGSTTMATGSGAPMADNNEGADGVGNSSGNWHCDSQWLGDRVITTSTRTWALPTYNNHLYKQISSQSGASNDNHYFGYSTPWGYFDFNRFHCHFSPRDWQRLINNNWGFRPKRLNFKLFNIQVKEVTQNDGTTTIANNLTSTVQVFTDSEYQLPYVLGSAHQGCLPPFPADVFMVPQYGYLTLNNGSQAVGRSSFYCLEYFPSQMLRTGNNFQFSYTFEDVPFHSSYAHSQSLDRLMNPLIDQYLYYLNKTQTNSGTLQQSRLLFSQAGPTNMSLQAKNRLPGPCYRQQRLSKQANDNNNSNFPWTAATKYHLNGRDSLVNPGPAMASHKDDEEKFFPMHGTLIFGKQGTNANDADLENVMITDEEEIRTTNPVATEQYGTVSNNLQNSNTGPTTGTVNHQGALPGMVWQDRDVYLQGPIWAKIPHTDGHFHPSPLVGGFGLKHPPPQIMIKNTPVPANPPTNFSSAKFASFITQYSTGQVSVEIEWELQKENSKRWNPEIQYTSNYNKSVNVDFTVDTNGVYSEPRPIGTRYLTRNL

SEQ ID NO: 309 - DNA, 3159 bp, Adeno-associated virus
gattgaatttagcggccgcgaattcgcccttgctgcgtcaactggaccaatgagaactttcctttcaatgattgcgtcgacaagatggtgatctggtgggaggagggaaagatgaccgccaaggtcgtggagtcggccaaagccattctcggaggaagcaaggtgcgcgtggaccagaaatgcaagtcctcggcccagatagacccgactcccgtgattgtcacctccaacaccgacatgtgcgccgtgattgacgggaactcaacgaccttcgaacaccagcagccgttgcaagaccggatgttcaaatttgaactcacccgccgtctggatcatgactttgggaaggtcaccaagcaggaagtcaaagactttttccggtgggcaaaggatcacgtggttgaggtggagcatgaattctacgtcaaaaagggtggagctaagaaaagacccgcccccagtgacgcagatataagtgagcccaaacgggcgcgcgagtcagttgcgcagccatcgacgtcagacgcggaagcttcgatcaactacgcggacaggtaccaaaacaaatgttctcgtcacgtgggcatgaatctgatgctgtttccctgcagacaatgcgagagaatgaatcagaattcaaatatctgcttcactcacggacagaaagactgtttagagtgctttcccgtgtcagaatctcaacccgtttctgtcgtcaaaaaggcgtatcagaaactttgctacattcatcatatcatgggaaaggtgccagacgcttgcactgcctgcgatctggtcaatgtggatttggatgactgcatctctgaacaataaatgatttaaatcaggtatggctgccgatggttatcttccagattggctcgaggacactctctctgaaggaataagacagtggtggaagctcaaacctggcccaccaccaccaaagcccgcagagcggcataaggacgacagcaggggtcttgtgcttcctgggtacaagtacctcggacccttcaacggactcgacaagggggagccggtcaacgaggcagacgccgcggccctcgagcacgacaaggcctacgaccggcagctcgacagcggagacaacccgtacctcaagtacaaccacgccgacgcggagtttcaggagcgccttaaagaagatacgtcttttgggggcaacctcggacgagcagtcttccaggcaaaaaagagggttcttgaacctctgggcctggttgaggaacctgttaaaacggctccgggaaaaaagaggccggtagagcaccctcctgtggagccagactcctcctcgggaaccggaaaagcgggccagcagcctgcaagaaaaagattgaatttcggtcagactggagacgcagactccgtacctgacccccagcctctcggacagccaccagcagccccctctggtctgggatctactacaatggctacaggcagtggcgcaccaatggcagacaataacgagggtgccgatggagtgggtaattcctcgggaaattggcattgcgattcccaatggctgggcgacagagtcatcaccaccagcacccgcacctgggccctgcccacctacaacaaccacctctacaagcaaatctccagccaatcaggagcctcaaacgacaaccactactttggctacagcaccccctgggggtattttgacttcaacagattccactgccacttttcaccacgtgactggcaaagactcatcaacaacaactggggattccgacccaagagactcaacttcaagctctttaacattcaagtcaaagaggtcacgcagaatgacggtacgacgacgattgccaataaccttaccagcacggttcaggtgtttactgactcggagtaccagctcccgtacgtcctcggctcggcgcatcaaggatgcctcccgccgtttccagcggacgtcttcatggtcccacagtatggatacctcaccctgaacaacgggagtcaggcagtaggacgctcttcattttactgcctggagtactttccttctcagatgctgcgtaccggaaacaactttcagttcagctacacttttgaagacgtgcctttccacagcagctacgctcacagccagagtctggatcggctgatgaatcctctgatcgaccagtacctgtattatctgaacaagacacaaacaaatagtggaactcttcagcagtctcggctactgtttagccaagctggacccaccaacatgtctcttcaagctaaaaaccggctgcctggaccttgctacagacagcagcgtctgtcaaagcaggcaaacgacaacaacaacagcaactttccctggaccgcagctacaaagtatcatctaaatggccgggactcgttggttaatccaggaccagctatggccagtcacaaggatgacgaagaaaagtttttccccatgcatggaacccttatatttggtaaacaaggaacaaatgccaacgacgcggatttggaaaatgtcatgattacagatgaagaagaaatcaggaccaccaatcccgtggctacggagcagtacggaactgtatcaaataatttgcaaaactcaaacactggtccaactactggaactgtcaatcaccaaggagcgttacctggtatggtgtggcaggatcgagacgtgtacctgcagggacccatttgggccaagattcctcacaccgatggacactttcatccttctccactggtgggaggttttggactcaaacacccacctcctcaaatcatgatcaaaaacactcccgttccagccaatcctcccacaaacttcagttctgccaagtttgcttctttcatcacacagtattccacggggcaggtcagcgtggagatcgagtgggagctgcagaaggagaacagcaaacgctggaatcccgaaattcagtacacttccaactacaacaaatctgttaatgtggactttactgtggacactaatggtgtgtattcagagcctcgccccattggcaccagatacctgactcgtaatctgtaattgcttgttaatcaataaaccgtttaattcgtttcagttgaactttggtctctgcgaagggcgaattcgtttaaacctgcaggactagtccctttagtgag

SEQ ID NO: 310 - DNA, 2208 bp, Adeno-associated virus
atggctgccgatggttatcttccagattggctcgaggacactctctctgaaggaataagacagtggtggaagctcaaacctggcccaccaccaccaaagcccgcagagcggcataaggacgacagcaggggtcttgtgcttcctgggtacaagtaccttggacccttcaacggactcgacaagggagagccggtcaacgaggcagacgccgcggccctcgagcacgacaaggcctacgaccggcagctcgacagcggagacaacccgtaccccaagtacaaccacgccgacgcggagttccaggagcgtcttaaagaagatacgtcttttgggggcaacctcggacgagcagtcttccaggcgaaaaagagggttcttgaacctctgggcctggttgaggaacctgttaagacggctccgggaaaaaagaggccggtagagcactctcctgcggagccagactcctcctcgggaaccggaaaagcgggccagcagcctgcaagaaagagattgaatttcggtcagactggagacgcagactccgtacctgacccccagcctctcggacagccaccagcagccccctctggtctgggaactaatacgatggctacaggcagtggcgcaccaatggcagacaataacgagggcgccgacggagtgggtaattcctcgggaaattggcattgcgattccacatggatgggcgacagagtcatcaccaccagcacccgcacctgggctctgcccacctacaacaaccacctctacaagcagatttccagccaatcaggagcctcaaacgacaaccactactttggctacagcaccccttgggggtattttgacttcaacagattccactgccacttttcgccacgtgactggcaaagactcatcaacaacaattggggattccggcccaaaagactcaacttcaagctctttaacattcaagtcaaggaggtcacgcagaatgacggtacgacgacgattgccaataaccttaccagcacggttcaggtgtttactgactcggagtaccagctcccgtacgtcctcggctcggcgcatcaaggatgcctcccgccgttcccagcagacgtcttcatggtgccacagtatggatacctcaccctgaacaacgggagtcaggcagtaggacgctcttcattttactgcctggagtactttccttctcagatgctgcgtaccggaaacaactttaccttcagctacacctttgaggacgttcctttccacagcagctacgcccacagccagagtttggaccgtctcatgaatcctctcatcgaccagtacctgtattacttgagcagaacaaacactccaagcggaaccaccacgcagtcaaggcttcagttttctcaggccggagcaagtgacattcgggaccagtctaggaactggcttcctggaccctgttaccgccagcagcgagtatcaaagacatctgcggataacaacaacagtgaatactcgtggactggagctaccaagtaccaccttaatggaagagactctctggtgaatccgggcccggccatggccagccacaaggacgatgaagaaaagttttttcctcagagcggggttctcatctttggaaaacaagactcgggaaaaactaatgtggacattgaaaaggtcatgattacagacgaagaggaaatcaggaccaccaatcccgtggctacggagcagtatggttctgtatctaccaacctccagagcggcaacacacaagcagctacctcagatgtcaacacacaaggcgttcttccaggcatggtgtggcaggacagagacgtgtacctgcaggggcccatctgggcaaagattccacacacggacggacattttcacccctctcccctcatgggcggattcggacttaaacaccctcccccgcagattctcatcaagaacaccccggtacctgcgaatccttcgactaccttcagtgcggcaaagtttgcttccttcattacacagtactccacggggcaggtcagcgtggagatcgagtgggagctgcagaaggagaacagcaaacgctggaatcccgagattcagtacacttccaactacaacaaatctgttaatgtggactttactgtggacactaatggtgtgtattcagagcctcgccccattggcaccaggtacctgactcgtaatctgtaa

SEQ ID NO: 311 - protein, 735 aa, Adeno-associated virus
MAADGYLPDWLEDTLSEGIRQWWKLKPGPPPPKPAERHKDDSRGLVLPGYKYLGPFNGLDKGEPVNEADAAALEHDKAYDRQLDSGDNPYPKYNHADAEFQERLKEDTSFGGNLGRAVFQAKKRVLEPLGLVEEPVKTAPGKKRPVEHSPAEPDSSSGTGKAGQQPARKRLNFGQTGDADSVPDPQPLGQPPAAPSGLGTNTMATGSGAPMADNNEGADGVGNSSGNWHCDSTWMGDRVITTSTRTWALPTYNNHLYKQISSQSGASNDNHYFGYSTPWGYFDFNRFHCHFSPRDWQRLINNNWGFRPKRLNFKLFNIQVKEVTQNDGTTTIANNLTSTVQVFTDSEYQLPYVLGSAHQGCLPPFPADVFMVPQYGYLTLNNGSQAVGRSSFYCLEYFPSQMLRTGNNFTFSYTFEDVPFHSSYAHSQSLDRLMNPLIDQYLYYLSRTNTPSGTTTQSRLQFSQAGASDIRDQSRNWLPGPCYRQQRVSKTSADNNNSEYSWTGATKYHLNGRDSLVNPGPAMASHKDDEEKFFPQSGVLIFGKQDSGKTNVDIEKVMITDEEEIRTTNPVATEQYGSVSTNLQSGNTQAATSDVNTQGVLPGMVWQDRDVYLQGPIWAKIPHTDGHFHPSPLMGGFGLKHPPPQILIKNTPVPANPSTTFSAAKFASFITQYSTGQVSVEIEWELQKENSKRWNPEIQYTSNYNKSVNVDFTVDTNGVYSEPRPIGTRYLTRNL

SEQ ID NO: 312 - DNA, 2208 bp, Adeno-associated virus
atggctgccgatggttatcttccagattggctcgaggacactctctctgaaggaataagacagtggtggaagctcaaacctggcccaccaccaccaaagcccgcagagcggcataaggacgacagcaggggtcttgtgcttcctgggtacaagtaccttggacccttcaacggactcgacaagggagagccggtcaacgaggcagacgccgcggccctcgagcacgacaaggcctacgaccggcagctcgacggcggagacaacccgtacctcaagtacaaccacgccgacgcggagttccaggagcgtcttaaagaagatacgtcttttgggggcaacctcggacgagcagtcttccaggcgaaaaagagggttcttgaacctctgggcctggttgaggaacctgttaagacggctccgggaaaaaagaggccggtagagcactctcttgcggagccagactcctcctcgggaaccggaaaagcgggccagcagcctgcaagaaggagattgaatttcggtcagactggagacgcagactccgtacctgacccccagcctctcggacagccaccagcagccccctctggtctgggaactaatacgatggctacaggcagtggcgcaccaatggcagacaataacgagggcgccgacggagtgggtaattcctcgggaaattggcattgcgattccacatggatgggcgacagagtcatcaccaccagcacccgcacctgggctctgcccacctacaacaaccacctctacaggcagatttccagccaatcaggagcctcaaacgacaaccactactttggctacagcaccccttgggggtattttgacttcaacagattccactgccacttttcgccacgtgactggcaaagactcatcaacaacaattggggatcccggcccaaaagactcaacttcaagctctttaacattcaagtcaaggaggtcacgcagaatgacggtacgacgacgattgccaataaccttaccagcacggttcaggtgtttactgactcggagtaccagctcccgtacgtcctcggctcggcgcatcaaggatgcctcccgccgttcccagcagacgtcttcatggtgccacagtatggatacctcaccctgaacaacgggagtcaggcagtaggacgctcttcattttactgcctggagtactttccttctcagatgctgcgtaccggaaacaactttaccttcagctacacctttgaggacgttcctttccacagcagctacgcccacagccagagtttggaccgtctcatgaatcctctcgtcgaccagtacctgtattacttgagcagaacaaacactccaagcggaaccaccacgcagtcaaggcttcagttttctcaggccggagcaagtgacattcgggaccagtctaggaactggcttcctggaccctgttaccgccagcagcgagtatcaaagacatctgcggataacaacaacagtgaatactcgtggactggagctaccaagtaccaccttaatggaagagactctctggtgaatccgggcccggccatggccagccacaaggacgatgaagaaaagttttttcctcagagcggggttctcatctttggaaaacaagactcgggaaaaactaatgtggacattgaaaaggtcatgattacagacgaagaggaaatcaggaccaccaatcccgtggctacggagcagtatggttctgtatctaccaacctccagagcggcaacacacaagcagctacctcagatgtcaacacacaaggcgttcttccaggcatggtgtggcaggacagagacgtgtacctgcaggggcccatctgggcaaagattccacacacggacggacattttcacccctctcccctcatgggcggattcggacttaaacaccctcccccgcagattctcatcaagaacaccccggtacctgcgaatccttcgactaccttcagtgcggcaaagtttgcttccttcattacacagtactccacggggcaggtcagcgtggagatcgagtgggagctgcagaaggagaacagcaaacgctggaatcccgagattcagtacacttccaactacaacaaatctgttaatgtggactttactgtggacactaatggtgtgtattcagagcctcgccccattggcaccagatacctgactcgtaatctgtaa

SEQ ID NO: 313 - protein, 735 aa, Adeno-associated virus
MAADGYLPDWLEDTLSEGIRQWWKLKPGPPPPKPAERHKDDSRGLVLPGYKYLGPFNGLDKGEPVNEADAAALEHDKAYDRQLDGGDNPYLKYNHADAEFQERLKEDTSFGGNLGRAVFQAKKRVLEPLGLVEEPVKTAPGKKRPVEHSLAEPDSSSGTGKAGQQPARRRLNFGQTGDADSVPDPQPLGQPPAAPSGLGTNTMATGSGAPMADNNEGADGVGNSSGNWHCDSTWMGDRVITTSTRTWALPTYNNHLYRQISSQSGASNDNHYFGYSTPWGYFDFNRFHCHFSPRDWQRLINNNWGSRPKRLNFKLFNIQVKEVTQNDGTTTIANNLTSTVQVFTDSEYQLPYVLGSAHQGCLPPFPADVFMVPQYGYLTLNNGSQAVGRSSFYCLEYFPSQMLRTGNNFTFSYTFEDVPFHSSYAHSQSLDRLMNPLVDQYLYYLSRTNTPSGTTTQSRLQFSQAGASDIRDQSRNWLPGPCYRQQRVSKTSADNNNSEYSWTGATKYHLNGRDSLVNPGPAMASHKDDEEKFFPQSGVLIFGKQDSGKTNVDIEKVMITDEEEIRTTNPVATEQYGSVSTNLQSGNTQAATSDVNTQGVLPGMVWQDRDVYLQGPIWAKIPHTDGHFHPSPLMGGFGLKHPPPQILIKNTPVPANPSTTFSAAKFASFITQYSTGQVSVEIEWELQKENSKRWNPEIQYTSNYNKSVNVDFTVDTNGVYSEPRPIGTRYLTRNL

SEQ ID NO: 314 - protein, 738 aa, Adeno-associated virus
MAADGYLPDWLEDNLSEGIREWWDLKPGAPKPKANQQKQDDGRGLVLPGYKYLGPFNGLDKGEPVNAADAAALEHDKAYDQQLKAGDNPYLRYNHADAEFQERLQEDTSFGGNLGRAVFQAKKRVLEPLGLVEEAAKTAPGKKRPVEPSPQRSPDSSAGIGKKGQQPAKKRLNFGQTGDSESVPDPQPIGEPPAGPSGLGSGTMAAGGGAPMADNNEGADGVGSSSGNWHCDSTWLGDRVITTSTRTWALPTYNNHLYKQISNGTSGGSTNDNTYFGYSTPWGYFDFNRFHCHFSPRDWQRLINNNWGFRPKRLSFKLFNIQVKEVTQNEGTETIANNLTSTIQVFTDSEYQLPYVLGSAHQGCLPPFPADVFMIPQYGYLTLNNGSQAVGRSSFYCLEYFPSQMLRTGNNFEFSYTFEDVPFHSSCAHSQSSDRLMNPLIDQYLYYLSRTRSTGGTQGTQQLLFSQAGPANMSAQAKNWLPGPCYRQQRVSTTLSQNNNSNFAWTGATKYHLNGRDSLVNPGVAMATHKDDEERFFPSSGVLMFGKQGAGRDNVDYSSVMLTSEEEIKTTNPVATEQYGVVADNLQQTNTGPIVGNVNSQGALPGMVWQNRDVYLQGPIWAKIPHTDGNFHPSPLMGGFGLKHPPPQILIKNTPVPADPPTTFSQAKLASFITQYSTGQVSVEIEWELQKENSKRWNPEIQYTSNYYKSTNVDFAVNTEGTYSEPRPIGTRYLTRNL

SEQ ID NO: 315 - DNA, 2217 bp, Adeno-associated virus
atggctgctgacggttatcttccagattggctcgaggacaacctctctgagggcattcgcgagtggtgggacctgaaacctggagcccccaagcccaaggccaaccagcagaagcaggacgacggccggggtctggtgcttcttggctacaagtacctcggacccttcaacggactcgacaagggggagcccgtcaatgcggcggacgcagcggccctcgagcacgacaaggcctacgaccagcagctcaaagcgggtgacaatccgtacctgcggtataaccacgccgacgccgagtttcaggagcgtctgcaagaagatacgtcttttgggggcaacctcgggcgagcagtcttccaggccaagaagcgggttctcgaacctctcggtctggttgaggaagctgctaagacggctcctggaaagaagagaccggtagaaccgtcacctcagcgttcccccgactcctccacgggcatcggcaagaaaggccagcagcccgctaaaaagagactgaactttggtcagactggcgactcagagtcagtccccgaccctcaaccaatcggagaaccaccagcaggcccctctggtctgggatctggtacaatggctgcaggcggtggcgctccaatggcagacaataacgaaggcgccgacggagtgggtagttcctcaggaaattggcattgcgattccacatggctgggcgacagagtcatcaccaccagcacccgaacctgggccctgcccacctacaacaaccacctctacaagcaaatatccaatgggacatcgggaggaagcaccaacgacaacacctacttcggctacagcaccccctgggggtattttgacttcaacagattccactgccacttctcaccacgtgactggcagcgactcatcaacaacaactggggattccggccaaaaagactcagcttcaagctcttcaacatccaggtcaaggaggtcacgcagaatgaaggcaccaagaccatcgccaataaccttaccagcacgattcaggtatttacggactcggaataccagctgccgtacgtcctcggctccgcgcaccagggctgcctgcctccgttcccggcggacgtcttcatgattccccagtacggctaccttacactgaacaatggaagtcaagccgtaggccgttcctccttctactgcctggaatattttccatctcaaatgctgcgaactggaaacaattttgaattcagctacaccttcgaggacgtgcctttccacagcggctacgcacacagccagagcttggaccgactgatgaatcctctcatcgaccagtacctgtactacttatccagaactcagtccacaggaggaactcaaggtacccagcaattgttattttctcaagctgggcctgcaaacatgtcggctcaggctaagaactggctacctggaccttgctaccggcagcagcgagtctctacgacactgtcgcaaaacaacaacagcaactttgcttggactggtgccaccaaatatcacctgaacggaagagactctttggtaaatcccggtgtcgccatggcaacccacaaggacgacgaggaacgcttcttcccgtcgagtggagtcctgatgtttggaaaacagggtgctggaagagacaatgtggactacagcagcgttatgctaaccagcgaagaagaaattaaaaccactaaccctgtagccacagaacaatacggtgtggtggctgacaacttgcagcaaaccaatacagggcctattgtgggaaatgtcaacagccaaggagccttacctggcatggtctggcagaaccgagacgtgtacctgcagggtcccatctgggccaagattcctcacacggacggcaacttccacccttcaccgctaatgggaggatttggactgaagcacccacctcctcagatcctgatcaagaacacgccggtacctgcggatcctccaacgacgttcagccaggcgaaattggcttccttcattacgcagtacagcaccggacaggtcagcgtggaaatcgagtgggagctgcagaaggagaacagcaaacgctggaacccagagattcagtacacttcaaactactacaaatctacaaatgtggactttgctgtcaatacagagggaacttattctgagcctcgccccattggtactcgttacctcacccgtaatctgtaa

SEQ ID NO: 316 - protein, 738 aa, Adeno-associated virus
MAADGYLPDWLEDNLSEGIREWWDLKPGAPKPKANQQKQDDGRGLVLLGYKYLGPFNGLDKGEPVNAADAAALEHDKAYDQQLKAGDNPYLRYNHADAEFQERLQEDTSFGGNLGRAVFQAKKRVLEPLGLVEEAAKTAPGKKRPVEPSPQRSPDSSTGIGKKGQQPAKKRLNFGQTGDSESVPDPQPIGEPPAGPSGLGSGTMAAGGGAPMADNNEGADGVGSSSGNWHCDSTWLGDRVITTSTRTWALPTYNNHLYKQISNGTSGGSTNDNTYFGYSTPWGYFDFNRFHCHFSPRDWQRLINNNWGFRPKRLSFKLFNIQVKEVTQNEGTKTIANNLTSTIQVFTDSEYQLPYVLGSAHQGCLPPFPADVFMIPQYGYLTLNNGSQAVGRSSFYCLEYFPSQMLRTGNNFEFSYTFEDVPFHSGYAHSQSLDRLMNPLIDQYLYYLSRTQSTGGTQGTQQLLFSQAGPANMSAQAKNWLPGPCYRQQRVSTTLSQNNNSNFAWTGATKYHLNGRDSLVNPGVAMATHKDDEERFFPSSGVLMFGKQGAGRDNVDYSSVMLTSEEEIKTTNPVATEQYGVVADNLQQTNTGPIVGNVNSQGALPGMVWQNRDVYLQGPIWAKIPHTDGNFHPSPLMGGFGLKHPPPQILIKNTPVPADPPTTFSQAKLASFITQYSTGQVSVEIEWELQKENSKRWNPEIQYTSNYYKSTNVDFAVNTEGTYSEPRPIGTRYLTRNL

SEQ ID NO: 317 - protein, 735 aa, Adeno-associated virus
MAADGYLPDWLEDTLSEGIRQWWKLKPGPPPPKPAERHKDDSRGLVLPGYKYLGPFNGLDKGEPVNEADAAALEHDKAYDRQLDSGDNPYLKYNHADAEFQERLKEDTSFGGNLGRAVFQAKKRVLEPLGLVEPPVKTAPGKKRPVEHSPAEPDSSSGTGKAGQQPARKRLNFGQTGDADSVPDPQPLGQPPAAPSGLGSTTMATGSGAPMADNNEGADGVGNSSGNWHCDSQWLGDRVITTSTRTWALPTYNNHLYKQISSQSGASNDNHYFGYSTPWGYFDFNRFHCHFSPRDWQRLINNNWGFRPKRLNFKLFNIQVKEVTQNDGTTTIANNLTSTVQVFTDSEYQLPYVLGSAHQGCLPPFPADVFMVPQYGYLTLNNGSQAVGRSSFYCLEYFPSQMLRTGNNFQFSYTFEDVPFHSSYAHSQSLDRLMNPLIDQYLYYLNKTQSNSGTLQQSRLLFSQAGPTSMSLQAKNWLPGPCYRQQRLSKQANDNNNSNFPWTAATKYHLNGRDSLVNPGPAMASHKDDEEKFFPMHGTLIFGKQGTNANDADLDNVMITDEEEIRTTNPVATEQYGYVSNNLQNSNTGPTTGTVNHQGALPGMVWQDRDVYLQGPIWAKIPHTDGHFHPSPLMGGFGLKHPPPQIMIKNTPVPANPPTNFSSAKFASFITQYSTGQVSVEIEWELQKENSKRWNPEIQYTSNYNKSVNVDFTVDTNGVYSEPRPIGTRYLTRNL

SEQ ID NO: 318 - protein, 735 aa, Adeno-associated virus
MAADGYLPDWLEDTLSEGIRQWWKLKPGPPPPKPAERHKDDSRGLVLPGYKYLGPFNGLDKGEPVNEADAAALEHDKAYDRQLDSGDNPYLKYNHADAEFQERLKEDTSFGGNLGRAVFQAKKRVLEPLGLVEGPVKTAPGKKRPVEHSPAEPDSSSGTGKAGQQPARKRLNFGQTGDADSVPDPQPLGQPPAAPSGLGSTTMATGSGAPMADNNEGADGVGNSSGNWHCDSQWLGDRVITTSTRTWALPTYNNHLYKQISSQSGASNDNHYFGYSTPWGYFDFNRFHCHFSPRDWQRLINNNWGFRPKRLNFKLFNIQVKEVTQNDGTTTIANNLTSTVQVFTDSEYQLPYVLGSAHQGCLPPFPADVFMVPQYGYLTLNNGSQAVGRSSFYCLEYFPSQMLRTGNNFQFSYTFEDVPFHSSYAHSQSLDRLMNPLIDQYLYYLNKTQSNSGTLQQSRLLFSQAGPTSMSLQAKNWLPGPCYRQQRLSKQANDNNNSNFPWTAATKYHLNGRDSLVNPGPAMASHKDDEEKFFPMHGTLIFGKQGTNANDADLDNVMITDEEEIRTTNPVATEQYGYVSNNLQNSNTGPTTGTVNHQGALPGMVWQDRDVYLQGPIWAKIPHTDGHFHPSPLMGGFGLKHPPPQIMIKNTPVPANPPTNFSSAKFASFITQYSTGQVSVEIEWELQKENSKRWNPEIQYTSNYNKSVNVDFTVDTNGVYSEPRPIGTRYLTRNL

SEQ ID NO: 319 - DNA, 2208 bp, Adeno-associated virus
atggctgccgatggttatcttccagattggctcgaggacactctctctgaaggaataagacagtggtggaagctcaaacctggcccaccaccaccaaagcccgcagagcggcataaggacgacagcaggggtcttgtgcttcctgggtacaagtacctcggacccttcaacggactcgacaagggggagccggtcaacgaggcagacgccgcggccctcgagcacgacaaggcctacgaccggcagctcgacagcggagacaacccgtacctcaagtacaaccacgccgacgcggagtttcaggagcgtcttaaagaagatacgtcttttgggggcaacctcggacgagcagtcttccaggcgaaaaagagggttcttgaacctctgggcctggttgagggacctgttaagacggctccgggaaaaaagaggccggtagagcactctcctgcggagccagactcctcctcgggaaccggaaaagcgggccagcagcctgcaagaaaaagattgaattttggtcagactggagacgcagactccgtacctgacccccagcctctcggacagccaccagcagccccctctggtttgggatctactacaatggctacaggcagtggcgcaccaatggcagacaataacgagggtgccgatggagtgggtaattcctcaggaaattggcattgcgattcccaatggctgggcgacagagtcatcaccaccagcacccgaacctgggccctgcccacctacaacaaccacctctacaagcaaatctcaagccaatcaggagcctcaaacgacaaccactactttggctacagcaccccttgggggtattttgacttcaacagattccactgccacttttcaccacgtgactggcaaagactcatcaacaacaactggggattccgacccaagagactcaacttcaagctctttaacattcaagtcaaagaggtcacgcagaatgacggtacgacgacgattgccaataaccttaccagcacggttcaggtgtttactgactcggagtaccagctcccgtacgtcctcgggtcggcgcatcaaggatgcctcccgccgtttccagcggacgtcttcatggtcccacagtatggatacctcaccctgaacaacgggagtcaggcggtaggacgctcttccttttactgcctggagtactttccttctcagatgcttcgtactggaaacaactttcagttcagctacacctttgaagacgttcctttccacagcagctacgctcacagccagagtctggatcggctgatgaatcctctgatcgaccagtacctgtattatctgaacaaaacacaatcaaatagtggaactcttcagcagtctcggctactgtttagtcaagctggacccaccagcatgtctcttcaagctaaaaactggctacctggaccttgctacagacagcagcgtctgtcaaagcaggcaaacgacaacaacaacagcaactttccctggactgcggctacaaagtatcacctaaatggccgggactcgttggttaatccaggaccagctatggccagtcacaaagacgatgaagaaaagtttttccccatgcatggaaccctgatatttggtaaacaaggaacaaatgctaacgacgcggatttggacaatgtcatgattacagatgaagaagaaatccgcaccaccaatcccgtggctacggagcagtacggatatgtgtcaaataatttgcaaaactcaaatactggtccaactactggaactgtcaatcaccaaggagcgttacctggcatggtgtggcaggatcgagacgtgtacctgcagggacccatttgggccaagattcctcacaccgatggacactttcatccttctccactgatgggaggttttgggctcaaacacccgcctcctcagatcatgatcaaaaacactcccgttccagccaatcctcccacaaacttcagttctgccaagtttgcttctttcatcacacagtattccacggggcaggtcagcgtggagatcgagtgggagctgcagaaagagaacagcaaacgctggaatcccgaaattcagtacacttccaactacaacaaatctgttaatgtggactttactgtggacactaatggcgtgtattcagagcctcgccccattggcaccagatacctgactcgtaatctgtaa

SEQ ID NO: 320 - DNA, 2211 bp, Adeno-associated virus; identical to SEQ ID NO: 1

SEQ ID NO: 321 - DNA, 2208 bp, Adeno-associated virus
atggctgccgatggttatcttccagattggctcgaggacactctctctgaaggaacaagacagtggtggaagctcaaacctggcccaccaccaccaaagcccgcagagcggcataaggacgacagcaggggtcttgtgcttcctgggtacaagtacctcggacccttcaacggactcgacaagggggagccggtcaacgaggcagacgccgcggccctcgagcacgacaaggcctacgaccggcagctcgacagcggagacaacccgtacctcaagtacaaccacgccgacgcggagtttcaggagcgtcttaaagaagatacgtcttttgggggcaacctcggacgagcagtcttccaggcgaaaaagagggttcttgaacctctgggcctggttgaggaacctgttaagacggctccgggaaaaaagaggccggtagagcactctcctgcggagccagactcctcctcgggaaccggaaaagcgggccagcagcctgcaagaaaaagattgaattttggtcagactggagacgcagactccgtacctgacccccagcctctcggacagccaccagcagccccctctggtttgggatctactacaatggctacaggcagtggcgcaccaatggcagacaataacgagggtgccgatggagtgggtaattcctcaggaaattggcattgcgattcccaatggctgggcgacagagtcatcaccaccagcacccgaacctgggccctgcccacctacaacaaccacctctacaagcaaatctcaagccaatcaggagcctcaaacgacaaccactactttggctacagcaccccttgggggtattttgacttcaacagattccactgccacttttcaccacgtgactggcaaagactcatcaacaacaactggggattccgacccaagagactcaacttcaagctctttaacattcaagtcaaagaggtcacgcagaatgacggtacgacgacgattgccaataaccttaccagcacggttcaggtgtttactgactcggagtaccagctcccgtacgtcctcgggtcggcgcatcaaggatgcctcccgccgtttccagcggacgtcttcatggtcccacagtatggatacctcaccctgaacaacgggagtcaggcggtaggacgctcttccttttactgcctggagtactttccttctcagatgcttcgtactggaaacaactttcagttcagctacacctttgaagacgttcctttccacagcagctacgctcacagccagagtctggatcggctgatgaatcctctgatcgaccagtacctgtattatctgaacaaaacacaatcaaatagtggaactcttcagcagtctcggctactgtttagtcaagctggacccaccagcatgtctcttcaagctaaaaactggctacctggaccttgctacagacagcagcgtctgtcaaagcaggcaaacgacaacaacaacagcaactttccctggactgcggctacaaagtaccacctaaatggccgggactcgttggttaatccaggaccagctatggccagtcacaaagacgatgaagaaaagtttttccccatgcatggaaccctgatatttggtaaacaaggaacaaatgctaacgacgcggatttggacaatgtcatgattacagatgaagaagaaatccgcaccaccaatcccgtggctacggagcagtacggatatgtgtcaaataatttgcaaaactcaaatactggtccaactactggaactgtcaatcaccaaggagcgttacctggcatggtgtggcaggatcgagacgtgtacctgcagggacccatttgggccaagattcctcacaccgatggacactttcatccttctccactgatgggaggttttgggctcaaacacccgcctcctcagatcatgatcaaaaacactcccgttccagccaatcctcccacaaacttcagttctgccaagtttgcttctttcatcacacagtattccacggggcaggtcagcgtggagatcgagtgggagctgcagaaagagaacagcaaacgctggaatcccgaaattcagtacacttccaactacaacaaatctgttaatgtggactttactgtggacactaatggcgtgtattcagagcctcgccccattggcaccagatacctgactcgtaatctgtaa

SEQ ID NO: 322 - DNA, 2217 bp, Adeno-associated virus
atggctgctgacggttatcttccagattggctcgaggacaacctctctgagggcattcgcgagtggtgggacctgaaacctggagcccccaagcccaaggccaaccagcagaagcaggacgacggccggggtctggtgcttcctggctacaagtacctcggacccttcaacggactcgacaagggggagcccgtcaacgcggcggacgcagcggccctcgagcacgacaaggcctacgaccagcagctcaaagcgggtgacaatccgtacctgcggtataaccacgccgacgccgagtttcaggagcgtctgcaagaagatacgtcttttgggggcaacctcgggcgagcagtcttccaggccaagaagcgggttctcgaacctctcggtctggttgaggaagctgctaagacggctcctggaaagaagagaccggtagaaccgtcacctcagcgttcccccgactcctccacgggcatcggcaagaaaggccagcagcccgctaaaaagagactgaactttggtcagactggcgactcagagtcagtccccgaccctcaaccaatcggagaaccacctgcaggcccctctggtctgggatctggtacaatggctgcaggcggtggcgctccaatggcagacaataacgaaggcgccgacggagtgggtagttcctcaggaaattggcattgcgattccacatggctgggcgacagagtcatcaccaccagcacccgaacctgggccctgcccacctacaacaaccacctctacaagcaaatatccaatgggacatcgggagggagcaccaacgacaacacctacttcggctacagcaccccctgggggtattttgacttcaacagattccactgccacttctcaccacgtgactggcagcgactcatcaacaacaactggggattccggccaaaaagactcagcttcaagctcttcaacatccaggtcaaggaggtcacgcagaatgaaggcaccaagaccatcgccaataaccttaccagcacgattcaggtatttacggactcggaataccagctgccgtacgtcctcggctccgcgcaccagggctgcctgcctccgttcccggcggacgtcttcatgattccccagtacggctaccttacactgaacaatggaagtcaagccgtaggccgttcctccttctactgcctggaatattttccatctcaaatgctgcgaactggaaacaattttgaattcagctacaccttcgaggacgtgcctttccacagcagctacgcacacagccagagcttggaccgactgatgaatcctctcatcgaccagtacctgtactacttatccagaactcagtccacaggaggaactcaaggtacccagcaattgttattttctcaagctgggcctgcaaacatgtcggctcaggctaagaactggctacctggaccttgctaccggcagcagcgagtctctacgacactgtcgcaaaacaacaacagcaactttgcttggactggtgccaccaaatatcacctgaacggaagagactctttggtaaatcccggtgtcgccatggcaacccacaaggacgacgaggaacgcttcttcccgtcgagtggagtcctgatgtttggaaaacagggtgctggaagagacaatgtggactacagcagcgttatgctaaccagcgaagaagaaattaaaaccactaaccctgtagccacagaacaatacggtgtggtggctgacaacttgcagcaaaccaatacagggcctattgtgggaaatgtcaacagccaaggagccttacctggcatggtctggcagaaccgagacgtgtacctgcagggtcccatctgggccaagattcctcacacggacggcaactgccacccttcaccgctaatgggaggatttggactgaagcacccacctcctcagatcctgatcaagaacacgccggtacctgcggatcctccaacaacgttcagccaggcgaaattggcttccttcattacgcagtacagcaccggacaggtcagcgtggaaatcgagtgggagctgcagaaggagaacagcaaacgctggaacccagagattcagtacacttcaaactactacaaatctacaaatgtggactttgctgtcaatacagagggaacttattctgagcctcgccccattggtactcgttacctcacccgtaatctgtaa

SEQ ID NO: 323 - protein, 735 aa, Adeno-associated virus
MAADGYLPDWLEDTLSEGTRQWWKLKPGPPPPKPAERHKDDSRGLVLPGYKYLGPFNGLDKGEPVNEADAAALEHDKAYDRQLDSGDNPYLKYNHADAEFQERLKEDTSFGGNLGRAVFQAKKRVLEPLGLVEEPVKTAPGKKRPVEHSPAEPDSSSGTGKAGQQPARKRLNFGQTGDADSVPDPQPLGQPPAAPSGLGSTTMATGSGAPMADNNEGADGVGNSSGNWHCDSQWLGDRVITTSTRTWALPTYNNHLYKQISSQSGASNDNHYFGYSTPWGYFDFNRFHCHFSPRDWQRLINNNWGFRPKRLNFKLFNIQVKEVTQNDGTTTIANNLTSTVQVFTDSEYQLPYVLGSAHQGCLPPFPADVFMVPQYGYLTLNNGSQAVGRSSFYCLEYFPSQMLRTGNNFQFSYTFEDVPFHSSYAHSQSLDRLMNPLIDQYLYYLNKTQSNSGTLQQSRLLFSQAGPTSMSLQAKNWLPGPCYRQQRLSKQANDNNNSNFPWTAATKYHLNGRDSLVNPGPAMASHKDDEEKFFPMHGTLIFGKQGTNANDADLDNVMITDEEEIRTTNPVATEQYGYVSNNLQNSNTGPTTGTVNHQGALPGMVWQDRDVYLQGPIWAKIPHTDGHFHPSPLMGGFGLKHPPPQIMIKNTPVPANPPTNFSSAKFASFITQYSTGQVSVEIEWELQKENSKRWNPEIQYTSNYNKSVNVDFTVDTNGVYSEPRPIGTRYLTRNL

SEQ ID NO: 324 - DNA, 2208 bp, Adeno-associated virus
atggctgccgatggttatcttccagattggctcgaggacactctctctgaaggaataagacagtggtggaagctcaaacctggcccaccaccaccaaagcccgcagagcggcatcaggacaacagcaggggtcttgtgcttcctgggtacaagtacctcggaccctccaacggactcgacaaaggagagccggtcaacgaggcagacgccgcggccctcgagcacgacaaggcctacgaccggcagctcgacagcggagacaacccgtacctcaagtacaaccacgccgacgcggagtttcaggagcgtcttaaagaagatacgtcttttgggggcaacctcggacgagcagtcttccaggcgaaaaagagggttcttgaacctctgggcctggttgaggaacctgttaagacggctccgggaaaaaagaggccggtagagcactctcctgtggagccagactcctcctcgggaaccggaaaagcgggccatcagcctgcgagaaagagattgaattttggtcagactggagacgcagactccgtacctgacccccagcctctcggacagccaccagcagcccccacaagtttgggatctactacaatggctacaggcagtggcgcaccaatggcagacaataacgagggtgccgatggagtgggtaattcctcaggaaattggcattgcgattcccaatggctgggcgacagagtcatcaccaccagcacccgaacctgggccctgcccacctacaacaaccacctctacaagcaaatctccagccaatcaggagcctcgaacgacaaccactactttggctgcagcaccccctgggggtattttgacttcaacagattccactgtcacttctccccacgtgattggcaaagactcatcaacaacaactggggattccgacccaagagactcaacttcaagctctttaacattcaagtcaaagaggtcacgcagaatgacggtacgacgacgattgccaataaccttaccagcacggttcaggtgtttactgactcggagtacccgctcccgtacgtcctcggctcggcgcatcaaggatgcctcccgccgtttccagcggacgtcttcatggtcccacagtatggatacctcaccctgaacaacgggagtcaggcggtaggacgctcttccttttactgcctggagtactttccttctcagatgctgcgtaccggaaacaactttaccttcagctacacctttgaggacgttcctttccacagcagctacgctcacagccagagtttggaccggctgatgaatcctctgatcgaccagtatctatattatctgaacaggacacaatcaaatagtggaactcttcagcagtctaggctactgtttagccaagctggacccaccagcatgtctcttcaagctaaaaactggctgcctggaccttgctacagacagcagcgtctttcaaagcaggcaaacgacaacaacaacagcaactttccctggactgcggctacaaagtatcatctaaatggccgggactcgttggttaatccaggaccagctatggccagccacaaagacgatgaagaaaagtttttccccatgcatggaaccctgatatttggtaaacaaggaacaaatgctaacgacgcggatttggagcatgttatgattacagatgaagaagaaatcaggaccaccaatcctgtggctacagagcagtacggaaacgtgtcaaataatttgcaaaactcaaatactggtccaactacagaaaatgtcaatcaccagggagcgttacctggtatggtgtggcaggatcgagacgtgtacctgcagggacccatttgggccaagattcctcacaccgacggacactttcacccttctccactgatgggaggttttggactcaaacacccgcctcctcaaatcatgatcaaaaacactcccgttccagccaatcctcccacaaacttcagttctgccaagtttgcttctttcatcacacagtattccacgggccaggtcagcgtggagattgagtgggagctgcagaaggagaacagcaaacgctggaaccccgagatccagtatacttccaactacaacaaatctgttaatgtggactttactgtggacactaatggtgtgtattcagagccttgccccattggcaccagatacctgactcgtaatctgtaa

SEQ ID NO: 325 - protein, 735 aa, Adeno-associated virus
MAADGYLPDWLEDTLSEGIRQWWKLKPGPPPPKPAERHQDNSRGLVLPGYKYLGPSNGLDKGEPVNEADAAALEHDKAYDRQLDSGDNPYLKYNHADAEFQERLKEDTSFGGNLGRAVFQAKKRVLEPLGLVEEPVKTAPGKKRPVEHSPVEPDSSSGTGKAGHQPARKRLNFGQTGDADSVPDPQPLGQPPAAPTSLGSTTMATGSGAPMADNNEGADGVGNSSGNWHCDSQWLGDRVITTSTRTWALPTYNNHLYKQISSQSGASNDNHYFGCSTPWGYFDFNRFHCHFSPRDWQRLINNNWGFRPKRLNFKLFNIQVKEVTQNDGTTTIANNLTSTVQVFTDSEYPLPYVLGSAHQGCLPPFPADVFMVPQYGYLTLNNGSQAVGRSSFYCLEYFPSQMLRTGNNFTFSYTFEDVPFHSSYAHSQSLDRLMNPLIDQYLYYLNRTQSNSGTLQQSRLLFSQAGPTSMSLQAKNWLPGPCYRQQRLSKQANDNNNSNFPWTAATKYHLNGRDSLVNPGPAMASHKDDEEKFFPMHGTLIFGKQGTNANDADLEHVMITDEEEIRTTNPVATEQYGNVSNNLQNSNTGPTTENVNHQGALPGMVWQDRDVYLQGPIWAKIPHTDGHFHPSPLMGGFGLKHPPPQIMIKNTPVPANPPTNFSSAKFASFITQYSTGQVSVEIEWELQKENSKRWNPEIQYTSNYNKSVNVDFTVDTNGVYSEPCPIGTRYLTRNL

SEQ ID NO: 326 - DNA, 2214 bp, Artificial Sequence
  Description of Artificial Sequence: Synthetic polynucleotide
atggctgccgatggttatcttccagattggctcgaggacaaccttagtgaaggaattcgcgagtggtgggctttgaaacctggagcccctcaacccaaggcaaatcaacaacatcaagacaacgctcgaggtcttgtgcttccgggttacaaataccttggacccggcaacggactcgacaagggggagccggtcaacgcagcagacgcggcggccctcgagcacgacaaggcctacgaccagcagctgcaggcgggtgacaatccgtacctgcggtataaccacgccgacgccgagtttcaggagcgtctgcaagaagatacgtcttttgggggcaaccttggcagagcagtcttccaggccaaaaagaggatccttgagcctcttggtctggttgaggaagcagctaaaacggctcctggaaagaagaggcctgtagatcagtctcctcaggaaccggactcatcatctggtgttggcaaatcgggcaaacagcctgccagaaaaagactaaatttcggtcagactggcgactcagagtcagtcccagaccctcaacctctcggagaaccaccagcagcccccacaagtttgggatctaatacaatggcttcaggcggtggcgcaccaatggcagacaataacgagggtgccgatggggtgggtagttcctcgggaaattggcattgcgattcccaatggctgggggacagagtcatcaccaccagcacccgaacctgggccctgcccacctacaacaatcacctctacaagcaaatctccaacgggacatcgggaggagccaccaacgacaacacctacttcggctacagcaccccctgggggtattttgactttaacagattccactgccacttttcaccacgtgactggcagcgactcatcaacaacaactggggattccggcccaagagactcagcttcaagctcttcaacatccaggtcaaggaggtcacgcagaatgaaggcaccaagaccatcgccaataacctcaccagcaccatccaggtgtttacggactcggagtaccagctgccgtacgttctcggctctgcgcaccagggctgcctccctccgttcccggcggacgtgttcatgattccgcaatacggctacctgacgctcaacaatggcagccaagccgtgggacgttcatccttttactgcctggaatatttcccttctcagatgctgagaacgggcaacaactttaccttcagctacacctttgaggaagtgcctttccacagcagctacgcgcacagccagagcttggaccggctgatgaatcctctgattgaccagtacctgtactacttgtctcggactcaaacaacaggaggcacggcaaatacgcagactctgggcttcagccaaggtgggcctaatacaatggccaatcaggcaaagaactggctgccaggaccctgttaccgccaacaacgcgtctcaacgacaaccgggcaaaacaacaatagcaactttgcctggactgctgggaccaaataccatctgaatggaagaaattcattggctaatcctggcatcgctatggcaacacacaaagacgacgaggagcgtttttttcccagtaacgggatcctgatttttggcaaacaaaatgctgccagagacaatgcggattacagcgatgtcatgctcaccagcgaggaagaaatcaaaaccactaaccctgtggctacagaggaatacggtatcgtggcagataacttgcagcagcaaaacacggctcctcaaattggaactgtcaacagccagggggccttacccggtatggtctggcagaaccgggacgtgtacctgcagggtcccatctgggccaagattcctcacacggacggcaacttccacccgtctccgctgatgggcggctttggcctgaaacatcctccgcctcagatcctgatcaagaacacgcctgtacctgcggatcctccgaccaccttcaaccagtcaaagctgaactctttcatcacgcaatacagcaccggacaggtcagcgtggagatcgagtgggagctgcagaaggaaaacagcaagcgctggaacccggagatccagtacacttccaactattacaagtctaataatgttgaatttgctgttaatactgaaggtgtatatagtgaaccccgccccattggcaccagatacctgactcgtaatctgtaa

SEQ ID NO: 327 - protein, 737 aa, Artificial Sequence
  Description of Artificial Sequence: Synthetic polypeptide
MAADGYLPDWLEDNLSEGIREWWALKPGAPQPKANQQHQDNARGLVLPGYKYLGPGNGLDKGEPVNAADAAALEHDKAYDQQLQAGDNPYLRYNHADAEFQERLQEDTSFGGNLGRAVFQAKKRILEPLGLVEEAAKTAPGKKRPVDQSPQEPDSSSGVGKSGKQPARKRLNFGQTGDSESVPDPQPLGEPPAAPTSLGSNTMASGGGAPMADNNEGADGVGSSSGNWHCDSQWLGDRVITTSTRTWALPTYNNHLYKQISNGTSGGATNDNTYFGYSTPWGYFDFNRFHCHFSPRDWQRLINNNWGFRPKRLSFKLFNIQVKEVTQNEGTKTIANNLTSTIQVFTDSEYQLPYVLGSAHQGCLPPFPADVFMIPQYGYLTLNNGSQAVGRSSFYCLEYFPSQMLRTGNNFTFSYTFEEVPFHSSYAHSQSLDRLMNPLIDQYLYYLSRTQTTGGTANTQTLGFSQGGPNTMANQAKNWLPGPCYRQQRVSTTTGQNNNSNFAWTAGTKYHLNGRNSLANPGIAMATHKDDEERFFPSNGILIFGKQNAARDNADYSDVMLTSEEEIKTTNPVATEEYGIVADNLQQQNTAPQIGTVNSQGALPGMVWQNRDVYLQGPIWAKIPHTDGNFHPSPLMGGFGLKHPPPQILIKNTPVPADPPTTFNQSKLNSFITQYSTGQVSVEIEWELQKENSKRWNPEIQYTSNYYKSNNVEFAVNTEGVYSEPRPIGTRYLTRNL

SEQ ID NO: 328 - DNA, 2211 bp, Artificial Sequence
  Description of Artificial Sequence: Synthetic polynucleotide
atggctgccgatggttatcttccagattggctcgaggacaacctctctgagggcattcgcgagtggtgggacttgaaacctggagccccgaagcccaaagccaaccagcaaaagcaggacgacggccggggtctggtgcttcctggctacaagtacctcggacccttcaacggactcgacaagggggagcccgtcaacgcggcggacgcagcggccctcgagcacgacaaggcctacgaccagcagctcaaagcgggtgacaatccgtacctgcggtataaccacgccgacgccgagtttcaggagcgtctgcaagaagatacgtcttttgggggcaacctcgggcgagcagtcttccaggccaagaagcgggttctcgaacctctcggtctggttgaggaaggcgctaagacggctcctggaaagaaacgtccggtagagcagtcgccacaagagccagactcctcctcgggcatcggcaagacaggccagcagcccgctaaaaagagactcaattttggtcagactggcgactcagagtcagtccccgacccacaacctctcggagaacctccagcaacccccgctgctgtgggacctactacaatggcttcaggcggtggcgcaccaatggcagacaataacgaaggcgccgacggagtgggtaatgcctcaggaaattggcattgcgattccacatggctgggcgacagagtcatcaccaccagcacccgaacatgggccttgcccacctataacaaccacctctacaagcaaatctccagtgcttcaacgggggccagcaacgacaaccactacttcggctacagcaccccctgggggtattttgatttcaacagattccactgccatttctcaccacgtgactggcagcgactcatcaacaacaattggggattccggcccaagagactcaacttcaagctcttcaacatccaagtcaaggaggtcacgacgaatgatggcgtcacgaccatcgctaataaccttaccagcacggttcaagtcttctcggactcggagtaccagctgccgtacgttctcggctctgcccaccagggctgcctgcctccgttcccggcggacgtgttcatgattccccagtacggctacctaacactcaacaacggtagtcaggccgtgggacgctcctccttctactgcctggaatactttccttcgcagatgctgagaaccggcaacaacttccagtttacttacaccttcgaggacgtgcctttccacagcagctacgcccacagccagagcttggaccggctgatgaatcctctgattgaccagtacctgtactacttgtctcggactcaaacaacaggaggcacggcaaatacgcagactctgggcttcagccaaggtgggcctaatacaatggccaatcaggcaaagaactggctgccaggaccctgttaccgccaacaacgcgtctcaacgacaaccgggcaaaacaacaatagcaattttacctggactggtgcttcaaaatataacctcaatgggcgtgaatccatcatcaaccctggcactgctatggcctcacacaaagacgacgaagacaagttctttcccatgagcggtgtcatgatttttggaaaagagagcgccggagcttcaaacactgcattggacaatgtcatgattacagacgaagaggaaattaaagccactaaccctgtggccaccgaaagatttgggaccgtggcagtcaatttccagagcagcagcacagaccctgcgaccggagatgtgcatgctatgggagcattacctggcatggtgtggcaagatagagacgtgtacctgcagggtcccatttgggccaaaattcctcacacagatggacactttcacccgtctcctcttatgggcggctttggactcaagaacccgcctcctcagatcctcatcaaaaacacgcctgttcctgcgaatcctccggcggagttttcagctacaaagtttgcttcattcatcacccaatactccacaggacaagtgagtgtggaaattgaatgggagctgcagaaagaaaacagcaagcgctggaatcccgaagtgcagtacacatccaattatgcaaaatctgccaacgttgattttactgtggacaacaatggactttatactgagcctcgccccattggcacccgttacctcacccgtcccctgtaa

SEQ ID NO: 329 - protein, 736 aa, Artificial Sequence
  Description of Artificial Sequence: Synthetic polypeptide
MAADGYLPDWLEDNLSEGIREWWDLKPGAPKPKANQQKQDDGRGLVLPGYKYLGPFNGLDKGEPVNAADAAALEHDKAYDQQLKAGDNPYLRYNHADAEFQERLQEDTSFGGNLGRAVFQAKKRVLEPLGLVEEGAKTAPGKKRPVEQSPQEPDSSSGIGKTGQQPAKKRLNFGQTGDSESVPDPQPLGEPPATPAAVGPTTMASGGGAPMADNNEGADGVGNASGNWHCDSTWLGDRVITTSTRTWALPTYNNHLYKQISSASTGASNDNHYFGYSTPWGYFDFNRFHCHFSPRDWQRLINNNWGFRPKRLNFKLFNIQVKEVTTNDGVTTIANNLTSTVQVFSDSEYQLPYVLGSAHQGCLPPFPADVFMIPQYGYLTLNNGSQAVGRSSFYCLEYFPSQMLRTGNNFQFTYTFEDVPFHSSYAHSQSLDRLMNPLIDQYLYYLSRTQTTGGTANTQTLGFSQGGPNTMANQAKNWLPGPCYRQQRVSTTTGQNNNSNFTWTGASKYNLNGRESIINPGTAMASHKDDEDKFFPMSGVMIFGKESAGASNTALDNVMITDEEEIKATNPVATERFGTVAVNFQSSSTDPATGDVHAMGALPGMVWQDRDVYLQGPIWAKIPHTDGHFHPSPLMGGFGLKNPPPQILIKNTPVPANPPAEFSATKFASFITQYSTGQVSVEIEWELQKENSKRWNPEVQYTSNYAKSANVDFTVDNNGLYTEPRPIGTRYLTRPL

SEQ ID NO: 330 - DNA, 2211 bp, Artificial Sequence
  Description of Artificial Sequence: Synthetic polynucleotide
atggctgctgacggttatcttccagattggctcgaggacaacctttctgaaggcattcgagagtggtgggcgctgcaacctggagcccctaaacccaaggcaaatcaacaacatcaggacaacgctcggggtcttgtgcttccgggttacaaatacctcggacccggcaacggactcgacaagggggaacccgtcaacgcagcggacgcggcagccctcgagcacgacaaggcctacgaccagcagctcaaggccggtgacaacccctacctcaagtacaaccacgccgacgccgagttccaggagcggctcaaagaagatacgtcttttgggggcaacctcgggcgagcagtcttccaggccaaaaagaggcttcttgaacctcttggtctggttgaggaagcggctaagacggctcctggaaagaagaggcctgtagatcagtctcctcaggaaccggactcatcatctggtgttggcaaatcgggcaaacagcctgccagaaaaagactaaatttcggtcagactggcgactcagagtcagtcccagaccctcaacctctcggagaaccaccagcagcccccacaagtttgggatctaatacaatggcttcaggcggtggcgcaccaatggcagacaataacgagggtgccgatggagtgggtaattcctcaggaaattggcattgcgattcccaatggctgggcgacagagtcatcaccaccagcaccagaacctgggccctgcccacttacaacaaccatctctacaagcaaatctccagccaatcaggagcttcaaacgacaaccactactttggctacagcaccccttgggggtattttgactttaacagattccactgccacttctcaccacgtgactggcagcgactcattaacaacaactggggattccggcccaagaaactcagcttcaagctcttcaacatccaagttaaagaggtcacgcagaacgatggcacgacgactattgccaataaccttaccagcacggttcaagtgtttacggactcggagtatcagctcccgtacgtgctcgggtcggcgcaccaaggctgtctcccgccgtttccagcggacgtcttcatggtccctcagtatggatacctcaccctgaacaacggaagtcaagcggtgggacgctcatccttttactgcctggagtacttcccttcgcagatgctaaggactggaaataacttccaattcagctataccttcgaggatgtaccttttcacagcagctacgctcacagccagagtttggatcgcttgatgaatcctcttattgatcagtatctgtactacctgaacagaacgcaaggaacaacctctggaacaaccaaccaatcacggctgctttttagccaggctgggcctcagtctatgtctttgcaggccagaaattggctacctgggccctgctaccggcaacagagactttcaaagactgctaacgacaacaacaacagtaactttccttggacagcggccagcaaatatcatctcaatggccgcgactcgctggtgaatccaggaccagctatggccagtcacaaggacgatgaagaaaaatttttccctatgcacggcaatctaatatttggcaaagaagggacaacggcaagtaacgcagaattagataatgtaatgattacggatgaagaagagattcgtaccaccaatcctgtggcaacagagcagtatggaactgtggcaaataacttgcagagctcaaatacagctcccacgactagaactgtcaatgatcagggggccttacctggcatggtgtggcaagatcgtgacgtgtaccttcaaggacctatctgggcaaagattcctcacacggatggacactttcatccttctcctctgatgggaggctttggactgaaacatccgcctcctcaaatcatgatcaaaaatactccggtaccggcaaatcctccgacgactttcagcccggccaagtttgcttcatttatcactcagtactccactggacaggtcagcgtggaaattgagtgggagctacagaaagaaaacagcaaacgttggaatccagagattcagtacacttccaactacaacaagtctgttaatgtggactttactgtagacactaatggtgtttatagtgaacctcgccccattggcacccgttaccttacccgtcccctgtaa

SEQ ID NO: 331 - protein, 736 aa, Artificial Sequence
  Description of Artificial Sequence: Synthetic polypeptide
MAADGYLPDWLEDNLSEGIREWWALQPGAPKPKANQQHQDNARGLVLPGYKYLGPGNGLDKGEPVNAADAAALEHDKAYDQQLKAGDNPYLKYNHADAEFQERLKEDTSFGGNLGRAVFQAKKRLLEPLGLVEEAAKTAPGKKRPVDQSPQEPDSSSGVGKSGKQPARKRLNFGQTGDSESVPDPQPLGEPPAAPTSLGSNTMASGGGAPMADNNEGADGVGNSSGNWHCDSQWLGDRVITTSTRTWALPTYNNHLYKQISSQSGASNDNHYFGYSTPWGYFDFNRFHCHFSPRDWQRLINNNWGFRPKKLSFKLFNIQVKEVTQNDGTTTIANNLTSTVQVFTDSEYQLPYVLGSAHQGCLPPFPADVFMVPQYGYLTLNNGSQAVGRSSFYCLEYFPSQMLRTGNNFQFSYTFEDVPFHSSYAHSQSLDRLMNPLIDQYLYYLNRTQGTTSGTTNQSRLLFSQAGPQSMSLQARNWLPGPCYRQQRLSKTANDNNNSNFPWTAASKYHLNGRDSLVNPGPAMASHKDDEEKFFPMHGNLIFGKEGTTASNAELDNVMITDEEEIRTTNPVATEQYGTVANNLQSSNTAPTTRTVNDQGALPGMVWQDRDVYLQGPIWAKIPHTDGHFHPSPLMGGFGLKHPPPQIMIKNTPVPANPPTTFSPAKFASFITQYSTGQVSVEIEWELQKENSKRWNPEIQYTSNYNKSVNVDFTVDTNGVYSEPRPIGTRYLTRPL

SEQ ID NO: 332 - DNA, 2211 bp, Artificial Sequence
  Description of Artificial Sequence: Synthetic polynucleotide
atggctgccgatggttatcttccagattggctcgaggacaaccttagtgaaggaattcgcgagtggtgggctttgaaacctggagcccctcaacccaaggcaaatcaacaacatcaagacaacgctcgaggtcttgtgcttccgggttacaaataccttggacccggcaacggactcgacaagggggagccggtcaacgcagcagacgcggcggccctcgagcacgacaaggcctacgaccagcagctcaaggccggagacaacccgtacctcaagtacaaccacgccgacgccgagttccaggagcggctcaaagaagatacgtcttttgggggcaacctcgggcgagcagtcttccaggccaaaaagaggcttcttgaacctcttggtctggttgaggaagcggctaagacggctcctggaaagaagagaccggtagagccatcaccccagcgttctccagactcctctacgggcatcggcaagaaaggccaacagcccgctaaaaagagactcaattttggtcagactggcgactcagagtcagtccccgacccacaacctctcggagaacctccagcaacccccgctgctgtgggacctactacaatggcttcaggcggtggcgcaccaatggcagacaataacgagggtgccgatggagtgggtaattcctcaggaaattggcattgcgattcccaatggctgggcgacagagtcatcaccaccagcaccagaacctgggccctgcccacttacaacaaccatctctacaagcaaatctccagccaatcaggagcttcaaacgacaaccactactttggctacagcaccccttgggggtattttgactttaacagattccactgccacttttcaccacgtgactggcaaagactcatcaacaacaactggggattccgacccaagagactcaacttcaagctcttcaacatccaagtcaaggaggtcacgacgaatgatggcgtcacgaccatcgctaataaccttaccagcacggttcaagtcttctcggactcggagtaccagttgccgtacgtcctcggctctgcgcaccagggctgcctccctccgttcccggcggacgtgttcatgattccgcagtacggctacctaacgctcaacaatggcagccaagccgtgggacgttcatccttttactgcctggaatatttcccttctcagatgctgagaacgggcaacaactttaccttcagctacacttttgaggacgttcctttccacagcagctacgctcacagccagagtctggaccgtctcatgaatcctctcatcgaccagtacctgtattacttgagcagaacaaacactccaagtggaaccaccacgcagtcaaggcttcagttttctcaggccggagcgagtgacattcgggaccagtctaggaactggcttcctggaccctgttaccgccagcagcgcgtttctaaaacaaaaacagacaacaacaacagcaattttacctggactggtgcttcaaaatataaccttaatgggcgtgaatctataatcaaccctggcactgctatggcctcacacaaagacgacgaagacaagttctttcccatgagcggtgtcatgatttttggaaaagagagcgccggagcttcaaacactgcattggacaatgtcatgattacagacgaagaggaaattaaagccactaaccctgtggccaccgaaagatttgggaccgtggcagtcaatttccagagcagcagcacagaccctgcgaccggagatgtgcatgttatgggagccttacctggaatggtgtggcaagacagagacgtatacctgcagggtcctatttgggccaaaattcctcacacggatggacactttcacccgtctcctcttatgggcggctttggactcaagaacccgcctcctcagatcctcatcaaaaacacgcctgttcctgcgaatcctccggcggagttttcagctacaaagtttgcttcattcatcacccaatactccacaggacaagtgagtgtggaaattgaatgggagctgcagaaagaaaacagcaagcgctggaatcccgaagtgcagtacacatccaattatgcaaaatctgccaacgttgattttactgtggacaacaatggactttatactgagcctcgccccattggcacccgttaccttacccgtcccctgtaa

SEQ ID NO: 333 - protein, 736 aa, Artificial Sequence
  Description of Artificial Sequence: Synthetic polypeptide
MAADGYLPDWLEDNLSEGIREWWALKPGAPQPKANQQHQDNARGLVLPGYKYLGPGNGLDKGEPVNAADAAALEHDKAYDQQLKAGDNPYLKYNHADAEFQERLKEDTSFGGNLGRAVFQAKKRLLEPLGLVEEAAKTAPGKKRPVEPSPQRSPDSSTGIGKKGQQPAKKRLNFGQTGDSESVPDPQPLGEPPATPAAVGPTTMASGGGAPMADNNEGADGVGNSSGNWHCDSQWLGDRVITTSTRTWALPTYNNHLYKQISSQSGASNDNHYFGYSTPWGYFDFNRFHCHFSPRDWQRLINNNWGFRPKRLNFKLFNIQVKEVTTNDGVTTIANNLTSTVQVFSDSEYQLPYVLGSAHQGCLPPFPADVFMIPQYGYLTLNNGSQAVGRSSFYCLEYFPSQMLRTGNNFTFSYTFEDVPFHSSYAHSQSLDRLMNPLIDQYLYYLSRTNTPSGTTTQSRLQFSQAGASDIRDQSRNWLPGPCYRQQRVSKTKTDNNNSNFTWTGASKYNLNGRESIINPGTAMASHKDDEDKFFPMSGVMIFGKESAGASNTALDNVMITDEEEIKATNPVATERFGTVAVNFQSSSTDPATGDVHVMGALPGMVWQDRDVYLQGPIWAKIPHTDGHFHPSPLMGGFGLKNPPPQILIKNTPVPANPPAEFSATKFASFITQYSTGQVSVEIEWELQKENSKRWNPEVQYTSNYAKSANVDFTVDNNGLYTEPRPIGTRYLTRPL

SEQ ID NO: 334 - DNA, 2211 bp, Artificial Sequence
  Description of Artificial Sequence: Synthetic polynucleotide
atggctgccgatggttatcttccagattggctcgaggacaacctctctgagggcattcgcgagtggtgggacttgaaacctggagcccctaaacccaaggcaaatcaacaacatcaggacaacgctcgaggtcttgtgcttccgggttacaaataccttggacccggcaacggactcgacaagggggagccggtcaacgcagcagacgcggcggccctcgagcacgacaaggcctacgaccagcagctcaaggccggagacaacccgtacctcaagtacaaccacgccgacgccgagttccaggagcggctcaaagaagatacgtcttttgggggcaacctcgggcgagcagtcttccaggccaaaaagaggcttcttgaacctcttggtctggttgaggaagcggctaagacggctcctggaaagaagagaccggtagagccatcaccccagcgttctccagactcctctacgggcatcggcaagaaaggccaacagcccgctaaaaagagactcaattttggtcagactggcgactcagagtcagtccccgacccacaacctctcggagaacctccagcaacccccgctgctgtgggacctactacaatggcttcaggcggtggcgcaccaatggcagacaataacgagggtgccgatggagtgggtaattcctcaggaaattggcattgcgattcccaatggctgggcgacagagtcatcaccaccagcaccagaacctgggccctgcccacttacaacaaccatctctacaagcaaatctccagccaatcaggagcttcaaacgacaaccactactttggctacagcaccccttgggggtattttgactttaacagattccactgccacttttcaccacgtgactggcaaagactcatcaacaacaactggggattccgacccaagagactcaacttcaagctcttcaacatccaagtcaaggaggtcacgacgaatgatggcgtcacgaccatcgctaataaccttaccagcacggttcaagtcttctcggactcggagtaccagttgccgtacgtcctcggctctgcgcaccagggctgcctccctccgttcccggcggacgtgttcatgattccgcagtacggctacctaacgctcaacaatggcagccaagccgtgggacgttcatccttttactgcctggaatatttcccttctcagatgctgagaacgggcaacaactttaccttcagctacacttttgaggacgttcctttccacagcagctacgctcacagccagagtctggaccgtctcatgaatcccctcatcgaccagtacctgtattacttgagcagaacaaacactccaagtggaaccaccacgcagtcaaggcttcagttttctcaggccggagcgagtgacattcgggaccagtctaggaactggcttcctggaccctgttaccggcagcagcgcgtttctaaaacaaaaacagacaacaacaacagcaactttacctggactggtgcttcaaaatataaccttaatgggcgtgaatctataatcaaccctggcactgctatggcctcacacaaagacgacgaagacaagttctttcccatgagcggtgtcatgatttttggaaaggagagcgccggagcttcaaacactgcattggacaatgtcatgatcacagacgaagaggaaatcaaagccactaaccccgtggccaccgaaagatttgggactgtggcagtcaatctccagagcagcagcacagaccctgcgaccggagatgtgcatgttatgggagccttacctggaatggtgtggcaagacagagacgtgtacctgcagggtcctatttgggccaaaattcctcacacggatggacactttcacccgtctcctctcatgggcggctttggacttaagcacccgcctcctcagatcctcatcaaaaacacgcctgttcctgcgaatcctccggcagagttttcggctacaaagtttgcttcattcatcacccagtattccacaggacaagtgagtgtggaaattgaatgggagctgcagaaagaaaacagcaagcgctggaatcccgaagtgcagtacacatccaattatgcaaaatctgccaacgttgattttactgtggacaacaatggactttatactgagcctcgccccattggcacccgttacctcacccgtcccctgtaa

SEQ ID NO: 335 - protein, 736 aa, Artificial Sequence
  Description of Artificial Sequence: Synthetic polypeptide
MAADGYLPDWLEDNLSEGIREWWDLKPGAPKPKANQQHQDNARGLVLPGYKYLGPGNGLDKGEPVNAADAAALEHDKAYDQQLKAGDNPYLKYNHADAEFQERLKEDTSFGGNLGRAVFQAKKRLLEPLGLVEEAAKTAPGKKRPVEPSPQRSPDSSTGIGKKGQQPAKKRLNFGQTGDSESVPDPQPLGEPPATPAAVGPTTMASGGGAPMADNNEGADGVGNSSGNWHCDSQWLGDRVITTSTRTWALPTYNNHLYKQISSQSGASNDNHYFGYSTPWGYFDFNRFHCHFSPRDWQRLINNNWGFRPKRLNFKLFNIQVKEVTTNDGVTTIANNLTSTVQVFSDSEYQLPYVLGSAHQGCLPPFPADVFMIPQYGYLTLNNGSQAVGRSSFYCLEYFPSQMLRTGNNFTFSYTFEDVPFHSSYAHSQSLDRLMNPLIDQYLYYLSRTNTPSGTTTQSRLQFSQAGASDIRDQSRNWLPGPCYRQQRVSKTKTDNNNSNFTWTGASKYNLNGRESIINPGTAMASHKDDEDKFFPMSGVMIFGKESAGASNTALDNVMITDEEEIKATNPVATERFGTVAVNLQSSSTDPATGDVHVMGALPGMVWQDRDVYLQGPIWAKIPHTDGHFHPSPLMGGFGLKHPPPQILIKNTPVPANPPAEFSATKFASFITQYSTGQVSVEIEWELQKENSKRWNPEVQYTSNYAKSANVDFTVDNNGLYTEPRPIGTRYLTRPL

SEQ ID NO: 336 - DNA, 2214 bp, Artificial Sequence
  Description of Artificial Sequence: Synthetic polynucleotide
atggctgccgatggttatcttccagattggctcgaggacaaccttagtgaaggaattcgcgagtggtgggctttgaaacctggagcccctcaacccaaggcaaatcaacaacatcaagacaacgctcgaggtcttgtgcttccgggttacaaataccttggacccggcaacggactcgacaagggggagccggtcaacgcagcagacgcggcggccctcgagcacgacaaggcctacgaccagcagctgcaggcgggtgacaatccgtacctgcggtataaccacgccgacgccgagtttcaggagcgtctgcaagaagatacgtcttttgggggcaaccttggcagagcagtcttccaggccaaaaagaggatccttgagcctcttggtctggttgaggaagcagctaaaacggctcctggaaagaagaggcctgtagatcagtctcctcaggaaccggactcatcatctggtgttggcaaatcgggcaaacagcctgccagaaaaagactaaatttcggtcagactggcgactcagagtcagtcccagaccctcaacctctcggagaaccaccagcagcccccacaagtttgggatctaatacaatggcttcaggcggtggcgcaccaatggcagacaataacgagggtgccgatggggtgggtagttcctcgggaaattggcattgcgattcccaatgactgggggacagagtcatcaccaccagcacccgaacctgggccctgcccacctacaacaatcacctctacaagcaaatctccaacgggacatcgggaggagccaccaacgacaacacctacttcggctacagcaccccctgggggtattttgactttaacagattccactgccacttttcaccacgtgactggcagcgactcatcaacaacaactggggattccggcccaagagactcagcttcaagctcttcaacatccaggtcaaggaggtcacgcagaatgaaggcaccaagaccatcgccaataacctcaccagcaccatccaggtgtttacggactcggagtaccagctgccgtacgttctcggctctgcgcaccagggctgcctccctccgttcccggcggacgtgttcatgattccgcaatacggctacctgacgctcaacaatggcagccaagccgtgggacgttcatccttttactgcctggaatatttcccttctcagatgctgagaacgggcaacaactttaccttcagctacacctttgaggaagtgcctttccacagcagctacgcgcacagccagagcttggaccggctgatgaatcctctgattgaccagtacctgtactacttgtctcggactcaaacaacaggaggcacggcaaatacgcagactctgggcttcagccaaggtgggcctaatacaatggccaatcaggcaaagaactggctgccaggaccctgttaccgccaacaacgcgtctcaacgacaaccgggcaaaacaacaatagcaactttgcctggactgctgggaccaaataccatctgaatggaagaaattcattggctaatcctggcatcgctatggcaacacacaaagacgacgaggagcgtttttttcccagtaacgggatcctgatttttggcaaacaaaatgctgccagagacaatgcggattacagcgatgtcatgctcaccagcgaggaagaaatcaaaaccactaaccctgtggctacagaggaatacggtatcgtggcagataacttgcagcagcaaaacacggctcctcaaattggaactgtcaacagccagggggccttacccggtatggtctggcagaaccgggacgtgtacctgcagggtcccatctgggccaagattcctcacacggacggcaacttccacccgtctccgctgatgggcggctttggcctgaaacatcctccgcctcagatcctgatcaagaacacgcctgtacctgcggatcctccgaccaccttcaaccagtcaaagctgaactctttcatcacgcaatacagcaccggacaggtcagcgtggagatcgagtgggagctgcagaaggaaaacagcaagcgctggaacccggagatccagtacacttccaactattacaagtctaataatgttgaatttgctgttaatactgaaggtgtatatagtgaaccccgccccattggcaccagatacctgactcgtaatctgtaa

SEQ ID NO: 337 - protein, 736 aa, Artificial Sequence
  Description of Artificial Sequence: Synthetic polypeptide
MAADGYLPDWLEDNLSEGIREWWALKPGAPQPKANQQHQDNARGLVLPGYKYLGPGNGLDKGEPVNAADAAALEHDKAYDQQLQAGDNPYLRYNHADAEFQERLQEDTSFGGNLGRAVFQAKKRILEPLGLVEEAAKTAPGKKRPVDQSPQEPDSSSGVGKSGKQPARKRLNFGQTGDSESVPDPQPLGEPPAAPTSLGSNTMASGGGAPMADNNEGADGVGSSSGNWHCDSQLGDRVITTSTRTWALPTYNNHLYKQISNGTSGGATNDNTYFGYSTPWGYFDFNRFHCHFSPRDWQRLINNNWGFRPKRLSFKLFNIQVKEVTQNEGTKTIANNLTSTIQVFTDSEYQLPYVLGSAHQGCLPPFPADVFMIPQYGYLTLNNGSQAVGRSSFYCLEYFPSQMLRTGNNFTFSYTFEEVPFHSSYAHSQSLDRLMNPLIDQYLYYLSRTQTTGGTANTQTLGFSQGGPNTMANQAKNWLPGPCYRQQRVSTTTGQNNNSNFAWTAGTKYHLNGRNSLANPGIAMATHKDDEERFFPSNGILIFGKQNAARDNADYSDVMLTSEEEIKTTNPVATEEYGIVADNLQQQNTAPQIGTVNSQGALPGMVWQNRDVYLQGPIWAKIPHTDGNFHPSPLMGGFGLKHPPPQILIKNTPVPADPPTTFNQSKLNSFITQYSTGQVSVEIEWELQKENSKRWNPEIQYTSNYYKSNNVEFAVNTEGVYSEPRPIGTRYLTRNL

SEQ ID NO: 338 - DNA, 2214 bp, Artificial Sequence
  Description of Artificial Sequence: Synthetic polynucleotide
atggctgccgatggttatcttccagattggctcgaggacaaccttagtgaaggaattcgcgagtggtgggctttgaaacctggagcccctcaacccaaggcaaatcaacaacatcaagacaacgctcgaggtcttgtgcttccgggttacaaataccttggacccggcaacggactcgacaagggggagccggtcaacgcagcagacgcggcggccctcgagcacgacaaggcctacgaccagcagctgcaggcgggtgacaatccgtacctgcggtataaccacgccgacgccgagtttcaggagcgtctgcaagaagatacgtcttttgggggcaaccttggcagagcagtcttccaggccaaaaagaggatccttgagcctcttggtctggttgaggaagcagctaaaacggctcctggaaagaagaggcctgtagatcagtctcctcaggaaccggactcatcatctggtgttggcaaatcgggcaaacagcctgccagaaaaagactaaatttcggtcagactggcgactcagagtcagtcccagaccctcaacctctcggagaaccaccagcagcccccacaagtttgggatctaatacaatggcttcaggcggtggcgcaccaatggcagacaataacgagggtgccgatggggtgggtagttcctcgggaaattggcattgcgattcccaatggctgggggacagagtcatcaccaccagcacccgaacctgggccctgcccacctacaacaatcacctctacaagcaaatctccaacgggacatcgggaggagccaccaacgacaacacctacttcggctacagcaccccctgggggtattttgactttaacagattccactgccacttttcaccacgtgactggcagcgactcatcaacaacaactggggattccggcccaagagactcagcttcaagctcttcaacatccaggtcaaggaggtcacgcagaatgaaggcaccaagaccatcgccaataacctcaccagcaccatccaggtgtttacggactcggagtaccagctgccgtacgttctcggctctgcgcaccagggctgcctccctccgttcccggcggacgtgttcatgattccgcaatacggctacctgacgctcaacaatggcagccaagccgtgggacgttcatccttttactgcctggaatatttcccttctcagatgctgagaacgggcaacaactttaccttcagctacacctttgaggaagtgccttttcacagcagctacgcgcacagccagagcttggaccggctgatgaatcctctgattgaccagtacctgtactacttgtctcggactcaaacaacaggaggcacggcaaatacgcagactctgggcttcagccaaggtgggcctaatacaatggccaatcaggcaaagaactggctgccaggaccctgttaccgccaacaacgcgtctcaacgacaaccgggcaaaacaacaatagcaactttgcctggactgctgggaccaaataccatctgaatggaagaaattcattggctaatcctggcatcgctatggcaacacacaaagacgacgaggagcgtttttttcccagtaacgggatcctgatttttggcaaacaaaatgctgccagagacaatgcggattacagcgatgtcatgctcaccagcgaggaagaaatcaaaaccactaaccctgtggctacagaggaatacggtatcgtggcagataacttgcagcagcaaaacacggctcctcaaattggaactgtcaacagccagggggccttacccggtatggtctggcagaaccgggacgtgtacctgcagggtcccatctgggccaagattcctcacacggacggcaacttccacccgtctccgctgatgggcggctttggcctgaaacatcctccgcctcagatcctgatcaagaacacgcctgtacctgcggatcctccgaccaccttcaaccagtcaaagctgaactctttcatcacgcaatacagcaccggacaggtcagcgtggagatcgagtgggagctgcagaaggaaaacagcaagcgctggaacccggagatccagtacacttccaactattacaagtctaataatgttgaatttgctgttaatactgaaggtgtatatagtgaaccccgccccattggcaccagatacctgactcgtaatctgtaa

SEQ ID NO: 339 - protein, 737 aa, Artificial Sequence; identical to SEQ ID NO: 327
  Description of Artificial Sequence: Synthetic polypeptide

SEQ ID NO: 340 - DNA, 2211 bp, Artificial Sequence
  Description of Artificial Sequence: Synthetic polynucleotide
atggctgccgatggttatcttccagattggctcgaggacaacctctctgagggcattcgcgagtggtgggacttgaaacctggagcccctaaacccaaggcaaatcaacaacatcaggacaacgctcgaggtcttgtgcttccgggttacaaataccttggacccggcaacggactcgacaagggggagccggtcaacgcagcagacgcggcggccctcgagcacgacaaggcctacgaccagcagctcaaggccggagacaacccgtacctcaagtacaaccacgccgacgccgagttccaggagcggctcaaagaagatacgtcttttgggggcaacctcgggcgagcagtcttccaggccaaaaagaggcttcttgaacctcttggtctggttgaggaagcggctaagacggctcctggaaagaagagaccggtagagccatcaccccagcgttctccagactcctctacgggcatcggcaagaaaggccaacagcccgctaaaaagagactcaattttggtcagactggcgactcagagtcagtccccgacccacaacctctcggagaacctccagcaacccccgctgctgtgggacctactacaatggcttcaggcggtggcgcaccaatggcagacaataacgagggtgccgatggagtgggtaattcctcaggaaattggcattgcgattcccaatggctgggcgacagagtcatcaccaccagcaccagaacctgggccctgcccacttacaacaaccatctctacaagcaaatctccagccaatcaggagcttcaaacgacaaccactactttggctacagcaccccttgggggtattttgactttaacagattccactgccacttttcaccacgtgactggcaaagactcatcaacaacaactggggattccgacccaagagactcaacttcaagctcttcaacatccaagtcaaggaggtcacgacgaatgatggcgtcacgaccatcgctaataaccttaccagcacggttcaagtcttctcggactcggagtaccagttgccgtacgtcctcggctctgcgcaccagggctgcctccctccgttcccggcggacgtgttcatgattccgcagtacggctacctaacgctcaacaatggcagccaagccgtgggacgttcatccttttactgcctggaatatttcccttctcagatgctgagaacgggcaacaactttaccttcagctacacttttgaggacgttcctttccacagcagctacgctcacagccagagtctggaccgtctcatgaatcctctcatcgaccagtacctgtattacttgagcagaacaaacactccaagtggaaccaccacgcagtcaaggcttcagttttctcaggccggagcgagtgacattcgggaccagtctaggaactggcttcctggaccctgttaccgccagcagcgcgtttctaaaacaaaaacagacaacaacaacagcaattttacctggactggtgcttcaaaatataaccttaatgggcgtgaatctataatcaaccctggcactgctatggcctcacacaaagacgacgaagacaagttctttcccatgagcggtgtcatgatttttggaaaagagagcgccggagcttcaaacactgcattggacaatgtcatgattacagacgaagaggaaattaaagccactaaccctgtggccaccgaaagatttgggaccgtggcagtcaatttccagagcagcagcacagaccctgcgaccggagatgtgcatgctatgggagcattacctggcatggtgtggcaagatagagacgtgtacctgcagggtcccatttgggccaaaattcctcacacagatggacactttcacccgtctcctcttatgggcggctttggactcaagaacccgcctcctcagatcctcatcaaaaacacgcctgttcctgcgaatcctccggcggagttttcagctacaaagtttgcttcattcatcacccaatactccacaggacaagtgagtgtggaaattgaatgggagctgcagaaagaaaacagcaagcgctggaatcccgaagtgcagtacacatccaattatgcaaaatctgccaacgttgattttactgtggacaacaatggactttatactgagcctcgccccattggcacccgttaccttacccgtcccctgtaa

SEQ ID NO: 341 - protein, 736 aa, Artificial Sequence
  Description of Artificial Sequence: Synthetic polypeptide
MAADGYLPDWLEDNLSEGIREWWDLKPGAPKPKANQQHQDNARGLVLPGYKYLGPGNGLDKGEPVNAADAAALEHDKAYDQQLKAGDNPYLKYNHADAEFQERLKEDTSFGGNLGRAVFQAKKRLLEPLGLVEEAAKTAPGKKRPVEPSPQRSPDSSTGIGKKGQQPAKKRLNFGQTGDSESVPDPQPLGEPPATPAAVGPTTMASGGGAPMADNNEGADGVGNSSGNWHCDSQWLGDRVITTSTRTWALPTYNNHLYKQISSQSGASNDNHYFGYSTPWGYFDFNRFHCHFSPRDWQRLINNNWGFRPKRLNFKLFNIQVKEVTTNDGVTTIANNLTSTVQVFSDSEYQLPYVLGSAHQGCLPPFPADVFMIPQYGYLTLNNGSQAVGRSSFYCLEYFPSQMLRTGNNFTFSYTFEDVPFHSSYAHSQSLDRLMNPLIDQYLYYLSRTNTPSGTTTQSRLQFSQAGASDIRDQSRNWLPGPCYRQQRVSKTKTDNNNSNFTWTGASKYNLNGRESIINPGTAMASHKDDEDKFFPMSGVMIFGKESAGASNTALDNVMITDEEEIKATNPVATERFGTVAVNFQSSSTDPATGDVHAMGALPGMVWQDRDVYLQGPIWAKIPHTDGHFHPSPLMGGFGLKNPPPQILIKNTPVPANPPAEFSATKFASFITQYSTGQVSVEIEWELQKENSKRWNPEVQYTSNYAKSANVDFTVDNNGLYTEPRPIGTRYLTRPL

SEQ ID NO: 342 - DNA, 2211 bp, Artificial Sequence
  Description of Artificial Sequence: Synthetic polynucleotide
atggctgccgatggttatcttccagattggctcgaggacaaccttagtgaaggaattcgcgagtggtgggcgctgaaacctggagccccgaagcccaaagccaaccagcaaaagcaggacgacggccggggtctggtgcttccgggttacaaatacctcggacccggtaacggactcgacaaaggagagccggtcaacgaggcggacgcggcagccctcgagcacgacaaggcctacgaccagcagctcaaagcgggtgacaatccgtacctgcggtataaccacgccgacgccgagtttcaggagcgtctgcaagaagatacgtcttttgggggcaacctcgggcgagcagtcttccaggccaagaagcgggttctcgaacctctcggtctggttgaggaaggcgctaagacggctcccggaaagaaacgtccggtagagcagtcgccacaagagccagactcctctacgggcatcggcaagaaaggccaacagcccgccagaaaaagactcaatttcggtcagactggcgactcagagtcagttccagaccctcaacctctcggagaacctccagcagcgccctctggtgtgggacctactacaatggcttcaggcggtggcgcaccaatggcagacaataacgaaggcgccgacggagtgggtaatgcctcaggaaattggcattgcgattccacatggctgggcgacagagtcatcaccaccagcacccgaacatgggccttgcccacctataacaaccacctctacaagcaaatctccagtgcttcaacgggggccagcaacgacaacacctacttcggctacagcaccccctgggggtattttgatttcaacagattccactgccatttctcaccacgtgactggcagcgactcatcaacaacaattggggattccggcccaagagactcaacttcaaactcttcaacatccaagtcaaggaggtcacgacgaatgatggcgtcacgaccatcgctaataaccttaccagcacggttcaagtcttctcggactcggagtaccagttgccgtacgtcctcggctctgcgcaccagggctgcctccctccgttcccggcggacgtgttcatgattccgcagtacggctacctaacgctcaacaatggcagccaggcagtgggacggtcatccttttactgcctggaatatttcccatcgcagatgctgagaacgggcaataactttaccttcagctacaccttcgaggacgtgcctttccacagcagctacgcgcacagccagagcctggaccggctgatgaatcctctcatcgaccagtacctgtattacctgaacagaactcagaatcagtccggaagtgcccaaaacaaggacttgctgtttagccgggggtctccagctggcatgtctgttcagcccaaaaactggctacctggaccctgttatcggcagcagcgcgtttctaaaacaaaaacagacaacaacaacagcaattttacctggactggtgcttcaaaatataacctcaatgggcgtgaatccatcatcaaccctggcactgctatggcctcacacaaagacgacgaagacaagttctttcccatgagcggtgtcatgatttttggaaaagagagcgccggagcttcaaacactgcattggacaatgtcatgattacagacgaagaggaaattaaagccactaaccctgtggccaccgaaagatttgggaccgtggcagtcaatttccagagcagcagcacagaccctgcgaccggagatgtgcatgttatgggagccttacctggaatggtgtggcaagacagagacgtatacctgcagggtcctatttgggccaaaattcctcacacagatggacactttcacccgtctcctcttatgggcggctttggactcaagaacccgcctcctcagatcctcatcaaaaacacgcctgttcctgcgaatcctccggcagagttttcggctacaaagtttgcttcattcatcacccagtattccacaggacaagtgagcgtggagattgaatgggagctgcagaaagaaaacagcaaacgctggaatcccgaagtgcagtatacatctaactatgcaaaatctgccaacgttgatttcactgtggacaacaatggactttatactgagcctcgccccattggcacccgttacctcacccgtcccctgtaa

SEQ ID NO: 343 - protein, 736 aa, Artificial Sequence
  Description of Artificial Sequence: Synthetic polypeptide
MAADGYLPDWLEDNLSEGIREWWALKPGAPKPKANQQKQDDGRGLVLPGYKYLGPGNGLDKGEPVNEADAAALEHDKAYDQQLKAGDNPYLRYNHADAEFQERLQEDTSFGGNLGRAVFQAKKRVLEPLGLVEEGAKTAPGKKRPVEQSPQEPDSSTGIGKKGQQPARKRLNFGQTGDSESVPDPQPLGEPPAAPSGVGPTTMASGGGAPMADNNEGADGVGNASGNWHCDSTWLGDRVITTSTRTWALPTYNNHLYKQISSASTGASNDNTYFGYSTPWGYFDFNRFHCHFSPRDWQRLINNNWGFRPKRLNFKLFNIQVKEVTTNDGVTTIANNLTSTVQVFSDSEYQLPYVLGSAHQGCLPPFPADVFMIPQYGYLTLNNGSQAVGRSSFYCLEYFPSQMLRTGNNFTFSYTFEDVPFHSSYAHSQSLDRLMNPLIDQYLYYLNRTQNQSGSAQNKDLLFSRGSPAGMSVQPKNWLPGPCYRQQRVSKTKTDNNNSNFTWTGASKYNLNGRESIINPGTAMASHKDDEDKFFPMSGVMIFGKESAGASNTALDNVMITDEEEIKATNPVATERFGTVAVNFQSSSTDPATGDVHVMGALPGMVWQDRDVYLQGPIWAKIPHTDGHFHPSPLMGGFGLKNPPPQILIKNTPVPANPPAEFSATKFASFITQYSTGQVSVEIEWELQKENSKRWNPEVQYTSNYAKSANVDFTVDNNGLYTEPRPIGTRYLTRPL

SEQ ID NO: 344 - DNA, 2205 bp, Artificial Sequence
  Description of Artificial Sequence: Synthetic polynucleotide
atggctgctgacggttatcttccagattggctcgaggacaacctttctgaaggcattcgtgagtggtgggctctgaaacctggagtccctcaacccaaagcgaaccaacaacaccaggacaaccgtcggggtcttgtgcttccgggttacaaatacctcggacccggtaacggactcgacaaaggagagccggtcaacgaggcggacgcggcagccctcgaacacgacaaggcctacgaccagcagctcaaggccggagacaacccgtacctcaagtacaaccacgccgacgccgagttccaggagcggctcaaagaagatacgtcttttgggggcaacctcgggcgagcagtcttccaggccaaaaagaggcttcttgaacctcttggtctggttgaggaagcggctaagacggctcctggaaagaagaggcctgtagagcagtctcctcaggaaccggactcctccgcgggtattggcaaatcgggtgcacagcccgctaaaaagagactcaatttcggtcagactggcgacacagagtcagtcccagaccctcaaccaatcggagaacctcccgcagccccctcaggtgtgggatctcttacaatggcttcaggtggtggcgcaccagtggcagacaataacgaaggtgccgatggagtgggtagttcctcgggaaattggcattgcgattcccaatggctgggggacagagtcatcaccaccagcacccgaacctgggccctgcccacctacaacaaccacctctacaaacaaatttccagccaatcaggagcctcgaacgacaatcactactttggctacagcaccccttgggggtattttgacttcaacagattccactgccacttttcaccacgtgactggcagcgactcatcaacaacaactggggattccggcccaagagactcagcttcaagctcttcaacatccaggtcaaagaggttacggacaacaatggagtcaagaccatcgccaataaccttaccagcacggtccaggtcttcacggactcagactatcagctcccgtacgtgctcgggtcggctcacgagggctgcctcccgccgttcccagcggacgttttcatgattcctcagtacgggtatctgacgcttaatgatggaagccaggccgtgggtcgttcgtccttttactgcctggaatatttcccgtcgcaaatgctaagaacgggtaacaacttccagttcagctacgagtttgagaacgtacctttccatagcagctacgctcacagccaaagcctggaccgactaatgaatccactcatcgaccaatacttgtactatctctcaaagactattaacggttctggacagaatcaacaaacgctaaaattcagtgtggccggacccagcaacatggctgtccagggaagaaactacatacctggacccagctaccgacaacaacgtgtctcaaccactgtgactcaaaacaacaacagcgaatttgcttggcctggagcttcttcttgggctctcaatggacgtaatagcttgatgaatcctggacctgctatggccagccacaaagaaggagaggaccgtttctttcctttgtctggatctttaatttttggcaaacaaggaactggaagagacaacgtggatgcggacaaagtcatgataaccaacgaagaagaaattaaaactactaacccggtagcaacggagtcctatggacaagtggccacaaaccaccagagtgcccaagcacaggcgcagaccggctgggttcaaaaccaaggaatacttccgggtatggtttggcaggacagagatgtgtacctgcaaggacccatctgggccaagattcctcacacggacggcaacttccacccgtctccgctgatgggcggctttggcctgaaacatcctccgcctcagatcctgatcaagaacacgcctgtacctgcggatcctccgaccaccttcaaccagtcaaagctgaactctttcatcacgcaatacagcaccggacaggtcagcgtggaaattgaatgggagctgcagaaggaaaacagcaagcgctggaatcccgaagtgcagtatacatctaactatgcaaaatctgccaacgttgatttcactgtggacaacaatggactttatactgagcctcgccccattggcacccgttacctcacccgtcccctgtaa

SEQ ID NO: 345 - protein, 734 aa, Artificial Sequence
  Description of Artificial Sequence: Synthetic polypeptide
MAADGYLPDWLEDNLSEGIREWWALKPGVPQPKANQQHQDNRRGLVLPGYKYLGPGNGLDKGEPVNEADAAALEHDKAYDQQLKAGDNPYLKYNHADAEFQERLKEDTSFGGNLGRAVFQAKKRLLEPLGLVEEAAKTAPGKKRPVEQSPQEPDSSAGIGKSGAQPAKKRLNFGQTGDTESVPDPQPIGEPPAAPSGVGSLTMASGGGAPVADNNEGADGVGSSSGNWHCDSQWLGDRVITTSTRTWALPTYNNHLYKQISSQSGASNDNHYFGYSTPWGYFDFNRFHCHFSPRDWQRLINNNWGFRPKRLSFKLFNIQVKEVTDNNGVKTIANNLTSTVQVFTDSDYQLPYVLGSAHEGCLPPFPADVFMIPQYGYLTLNDGSQAVGRSSFYCLEYFPSQMLRTGNNFQFSYEFENVPFHSSYAHSQSLDRLMNPLIDQYLYYLSKTINGSGQNQQTLKFSVAGPSNMAVQGRNYIPGPSYRQQRVSTTVTQNNNSEFAWPGASSWALNGRNSLMNPGPAMASHKEGEDRFFPLSGSLIFGKQGTGRDNVDADKVMITNEEEIKTTNPVATESYGQVATNHQSAQAQAQTGWVQNQGILPGMVWQDRDVYLQGPIWAKIPHTDGNFHPSPLMGGFGLKHPPPQILIKNTPVPADPPTTFNQSKLNSFITQYSTGQVSVEIEWELQKENSKRWNPEVQYTSNYAKSANVDFTVDNNGLYTEPRPIGTRYLTRPL

SEQ ID NO: 346 - DNA, 2211 bp, Artificial Sequence
  Description of Artificial Sequence: Synthetic polynucleotide
atggctgccgatggttatcttccagattggctcgaggacaacctctctgagggcattcgcgagtggtgggcgctgaaacctggagccccgaagcccaaagccaaccagcaaaagcaggacgacggccggggtctggtgcttcctggctacaagtacctcggacccttcaacggactcgacaagggggagcccgtcaacgcggcggacgcagcggccctcgagcacgacaaggcctacgaccagcagctgcaggcgggtgacaatccgtacctgcggtataaccacgccgacgccgagtttcaggagcgtctgcaagaagatacgtcttttgggggcaacctcgggcgagcagtcttccaggccaagaagtgggttctcgaacctctcggtctggttgaggaaggcgctaagacggctcctggaaagaaacgtccggtagagcagtcgccacaagagccagactcctcctcgggcatcggcaagacaggccagcagcccgctaaaaagagactcaattttggtcagactggcgactcagagtcagtccccgacccacaacctctcggagaacctccagcaacccccgctgctgtgggacctactacaatggcttcaggcggtggcgcaccaatggcagacaataacgaaggcgccgacggagtgggtaatgcctcaggaaattggcattgcgattccacatggctgggcgacagagtcatcaccaccagcacccgcacctgggccttgcccacctacaataaccacctctacaagcaaatctccagtgcttcaacgggggccagcaacgacaaccactacttcggctacagcaccccctgggggtattttgatttcaacagattccactgccatttctcaccacgtgactggcagcgactcatcaacaacaattggggattccggcccaagagactcaacttcaagctcttcaacatccaagtcaaggaggtcacgacgaatgatggcgtcacaaccatcgctaataaccttaccagcacggttcaagtcttctcggactcggagtaccagcttccgtacgtcctcggctctgcgcaccagggctgcctccctccgttcccggcggacgtgttcatgattccgcaatacggctacctgacgctcaacaatggcagccaagccgtgggacgttcatccttttactgcctggaatatttcccttctcagatgctgagaacgggcaacaactttaccttcagctacacctttgaggaagtgcctttccacagcagctacgcgcacagccagagcctggaccggctgatgaatcctctcatcgaccaatacctgtattacctgaacagaactcaaaatcagtccggaagtgcccaaaacaaggacttgctgtttagccgtgggtctccagctggcatgtctgttcagcccaaaaactggctacctggaccctgttatcggcagcagcgcgtttctaaaacaaaaacagacaacaacaacagcaattttacctggactggtgcttcaaaatataacctcaatgggcgtgaatccatcatcaaccctggcactgctatggcctcacacaaagacgacgaagacaagttctttcccatgagcggtgtcatgatttttggaaaggagagcgccggagcttcaaacactgcattggacaatgtcatgatcaccgacgaagaggaaatcaaagccactaaccccgtggccaccgaaagatttgggactgtggcagtcaatctccagagcagcagcacagaccctgcgaccggagatgtgcatgttatgggagccttacctggcatggtgtggcaagatagagacgtgtacctgcagggtcccatttgggccaaaattcctcacacagatggacactttcacccgtctcctcttatgggcggctttggactcaagaacccgcctcctcagatcctcatcaaaaacacgcctgttcctgcgaatcctccggcggagttttcagctacaaagtttgcttcattcatcacccaatactccacaggacaagtgagtgtggaaattgaatgggagctgcagaaagaaaacagcaagcgctggaatcccgaagtgcagtacacatccaattatgcaaaatctgccaacgttgattttactgtggacaacaatggactttatactgagcctcgccccattggcacccgttacctcacccgtcccctgtaa

SEQ ID NO: 347 - protein, 736 aa, Artificial Sequence
  Description of Artificial Sequence: Synthetic polypeptide
MAADGYLPDWLEDNLSEGIREWWALKPGAPKPKANQQKQDDGRGLVLPGYKYLGPFNGLDKGEPVNAADAAALEHDKAYDQQLQAGDNPYLRYNHADAEFQERLQEDTSFGGNLGRAVFQAKKWVLEPLGLVEEGAKTAPGKKRPVEQSPQEPDSSSGIGKTGQQPAKKRLNFGQTGDSESVPDPQPLGEPPATPAAVGPTTMASGGGAPMADNNEGADGVGNASGNWHCDSTWLGDRVITTSTRTWALPTYNNHLYKQISSASTGASNDNHYFGYSTPWGYFDFNRFHCHFSPRDWQRLINNNWGFRPKRLNFKLFNIQVKEVTTNDGVTTIANNLTSTVQVFSDSEYQLPYVLGSAHQGCLPPFPADVFMIPQYGYLTLNNGSQAVGRSSFYCLEYFPSQMLRTGNNFTFSYTFEEVPFHSSYAHSQSLDRLMNPLIDQYLYYLNRTQNQSGSAQNKDLLFSRGSPAGMSVQPKNWLPGPCYRQQRVSKTKTDNNNSNFTWTGASKYNLNGRESIINPGTAMASHKDDEDKFFPMSGVMIFGKESAGASNTALDNVMITDEEEIKATNPVATERFGTVAVNLQSSSTDPATGDVHVMGALPGMVWQDRDVYLQGPIWAKIPHTDGHFHPSPLMGGFGLKNPPPQILIKNTPVPANPPAEFSATKFASFITQYSTGQVSVEIEWELQKENSKRWNPEVQYTSNYAKSANVDFTVDNNGLYTEPRPIGTRYLTRPL

SEQ ID NO: 348 - DNA, 2214 bp, Artificial Sequence
  Description of Artificial Sequence: Synthetic polynucleotide
atggctgccgatggttatcttccagattggctcgaggacaaccttagtgaaggaattcgcgagtggtgggctttgaaacctggagcccctcaacccaaggcaaatcaacaacatcaagacaacgctcgaggtcttgtgcttccgggttacaaataccttggacccggcaacggactcgacaagggggagccggtcaacgcagcagacgcggcggccctcgagcacgacaaggcctacgaccagcagctgcaggcgggtgacaatccgtacctgcggtataaccacgccgacgccgagtttcaggagcgtctgcaagaagatacgtcttttgggggcaaccttggcagagcagtcttccaggccaaaaagaggatccttgagcctcttggtctggttgaggaagcagctaaaacggctcctggaaagaagaggcctgtagatcagtctcctcaggaaccggactcatcatctggtgttggcaaatcgggcaaacagcctgccagaaaaagactaaatttcggtcagactggcgactcagagtcagtcccagaccctcaacctctcggagaaccaccagcagcccccacaagtttgggatctaatacaatggcttcaggcggtggcgcaccaatggcagacaataacgagggtgccgatggggtgggtagttcctcgggaaattggcattgcgattcccaatggctgggggacagagtcatcaccaccagcacccgaacctgggccctgcccacctacaacaatcacctctacaagcaaatctccaacgggacatcgggaggagccaccaacgacaacacctacttcggctacagcaccccctgggggtattttgactttaacagattccactgccacttttcaccacgtgactggcagcgactcatcaacaacaactggggattccggcccaagagactcagcttcaagctcttcaacatccaggtcaaggaggtcacgcagaatgaaggcaccaagaccatcgccaataacctcaccagcaccatccaggtgtttacggactcggagtaccagctgccgtacgttctcggctcggcgcaccagggctgcctccctccgttcccggcggacgtcttcatggtgccacagtatggatacctgacgctcaacaatggcagccaagccgtgggacgttcatccttttactgcctggaatatttcccttctcagatgctgagaacgggcaacaactttaccttcagctacacctttgaggaagtgcctttccacagcagctacgcgcacagccagagcttggaccggctgatgaatcctctgattgaccagtacctgtactacttgtctcggactcaaacaacaggaggcacggcaaatacgcagactctgggcttcagccaaggtgggcctaatacaatggccaatcaggcaaagaactggctgccaggaccctgttaccgccaacaacgcgtctcaacgacaaccgggcaaaacaacaatagcaactttgcctggactgctgggaccaaataccatctgaatggaagaaattcattggctaatcctggcatcgctatggcaacacacaaagacgacgaggagcgtttttttcccagtaacgggatcctgatttttggcaaacaaaatgctgccagagacaatgcggattacagcgatgtcatgctcaccagcgaggaagaaatcaaaaccactaaccctgtggctacagaggaatacggtatcgtggcagataacttgcagcagcaaaacacggctcctcaaattggaactgtcaacagccagggggacttacccggtatggtctggcagaaccgggacgtgtacctgcagggtcccatctgggccaagattcctcacacggacggcaacttccacccgtctccgctgatgggcggctttggcctgaaacatcctccgcctcagatcctgatcaagaacacgcctgtacctgcggatcctccgaccaccttcaaccagtcaaagctgaactctttcatcacgcaatacagcaccggacaggtcagcgtggagatcgagtgggagctgcagaaggaaaacagcaagcgctggaacccggagatccagtacacttccaactattacaagtctaataatgttgaatttgctgttaatactgaaggtgtatatagtgaaccccgccccattggcaccagatacctgactcgtaatctgtaa

SEQ ID NO: 349 - protein, 737 aa, Artificial Sequence
  Description of Artificial Sequence: Synthetic polypeptide
MAADGYLPDWLEDNLSEGIREWWALKPGAPQPKANQQHQDNARGLVLPGYKYLGPGNGLDKGEPVNAADAAALEHDKAYDQQLQAGDNPYLRYNHADAEFQERLQEDTSFGGNLGRAVFQAKKRILEPLGLVEEAAKTAPGKKRPVDQSPQEPDSSSGVGKSGKQPARKRLNFGQTGDSESVPDPQPLGEPPAAPTSLGSNTMASGGGAPMADNNEGADGVGSSSGNWHCDSQWLGDRVITTSTRTWALPTYNNHLYKQISNGTSGGATNDNTYFGYSTPWGYFDFNRFHCHFSPRDWQRLINNNWGFRPKRLSFKLFNIQVKEVTQNEGTKTIANNLTSTIQVFTDSEYQLPYVLGSAHQGCLPPFPADVFMVPQYGYLTLNNGSQAVGRSSFYCLEYFPSQMLRTGNNFTFSYTFEEVPFHSSYAHSQSLDRLMNPLIDQYLYYLSRTQTTGGTANTQTLGFSQGGPNTMANQAKNWLPGPCYRQQRVSTTTGQNNNSNFAWTAGTKYHLNGRNSLANPGIAMATHKDDEERFFPSNGILIFGKQNAARDNADYSDVMLTSEEEIKTTNPVATEEYGIVADNLQQQNTAPQIGTVNSQGDLPGMVWQNRDVYLQGPIWAKIPHTDGNFHPSPLMGGFGLKHPPPQILIKNTPVPADPPTTFNQSKLNSFITQYSTGQVSVEIEWELQKENSKRWNPEIQYTSNYYKSNNVEFAVNTEGVYSEPRPIGTRYLTRNL

SEQ ID NO: 350 - DNA, 2205 bp, Artificial Sequence
  Description of Artificial Sequence: Synthetic polynucleotide
atggctgctgacggttatcttccagattggctcgaggacaacctttctgaaggcattcgtgagtggtgggctctgaaacctggagtccctcaacccaaagcgaaccaacaacaccaggacaactgtcggggtcttgtgcttccgggttacaaatacctcggacccggtaacggactcgacaaaggagagccggtcaacgaggcggacgcggcagccctcgaacacgacaaggcctacgaccagcagctcaaggccggagacaacccgtacctcaagtacaaccacgccgacgccgagttccaggagcggctcaaagaagatacgtcttttgggggcaacctcgggcgagcagtcttccagaccaaaaagaggcttcttgaacctcttggtctggttgaggaagcggctaagacggctcctggaaagaagaggcctgtagagcagtctcctcaggaaccggactcctccgcgggtattggcaaatcgggtgcacagcccgctaaaaagagactcaatttcggtcagactggcgacacagagtcagtcccagaccctcaaccaatcggagaacctcccgcagccccctcaggtgtgggatctcttacaatggcttcaggtggtggcgcaccagtggcagacaataacgaaggtgccgatggagtgggtagttcctcgggaaattggcattgcgattcccaatggctgggggacagagtcatcaccaccagcacccgaacctgggccctgcccacctacaacaaccacctctacaaacaaatttccagccaatcaggagcctcgaacgacaatcactactttggctacagcaccccttgggggtattttgacttcaacagattccactgccacttttcaccacgtgactggcagcgactcatcaacaacaactggggattccggcccaagagactcagcttcaagctcttcaacatccaggtcaaagaggttacggacaacaatggagtcaagaccatcgccaataaccttaccagcacggtccaggtcttcacggactcagactatcagctcccgtacgtgctcgggtcggctcacgagggctgcctcccgccgttcccagcggacgttttcatgattcctcagtacgggtatctgacgcttaatgatggaagccaggccgtgggtcgttcgtccttttactgcctggaatatttcccgtcgcaaatgctaagaacgggtaacaacttccagttcagctacgagtttgagaacgtacctttccatagcagctacgctcacagccaaagcctggaccgactaatgaatccactcatcgaccaatacttgtactatctctcaaagactattaacggttctggacagaatcaacaaacgctaaaattcagtgtggccggacccagcaacatggctgtccagggaagaaactacatacctggacccagctaccgacaacaacgtgtctcaaccactgtgactcaaaacaacaacagcgaatttgcttggcctggagcttcttcttgggctctcaatggacgtaatagcttgatgaatcctggacctgctatggccagccacaaagaaggagaggaccgtttctttcctttgtctggatctttaatttttggcaaacaaggaactggaagagacaacgtggatgcggacaaagtcatgataaccaacgaagaagaaattaaaactactaacccggtagcaacggagtcctatggacaagtggccacaaaccaccagagtgcccaagcacaggcgcagaccggctgggttcaaaaccaaggaatacttccgggtatggtttggcaggacagagatgtgtacctgcaaggacccatctgggccaagattcctcacacggacggcaacttccacccgtctccgctgatgggcggctttggcctgaaacatcctccgcctcagatcctgatcaagaacacgcctgttcctgcgaatcctccggcggagttttcagctacaaagtttgcttcattcatcacccagtactccacaggacaagtgagtgtggaaattgaatgggagctgcagaaagaaaacagcaagcgctggaatcccgaagtgcagtacacatccaattatgcaaaatctgccaacgttgattttactgtggacaacaatggactttatactgagcctcgccccattggcacccgttaccttaccaaacctctgtaa

SEQ ID NO: 351 - protein, 734 aa, Artificial Sequence
  Description of Artificial Sequence: Synthetic polypeptide
MAADGYLPDWLEDNLSEGIREWWALKPGVPQPKANQQHQDNCRGLVLPGYKYLGPGNGLDKGEPVNEADAAALEHDKAYDQQLKAGDNPYLKYNHADAEFQERLKEDTSFGGNLGRAVFQTKKRLLEPLGLVEEAAKTAPGKKRPVEQSPQEPDSSAGIGKSGAQPAKKRLNFGQTGDTESVPDPQPIGEPPAAPSGVGSLTMASGGGAPVADNNEGADGVGSSSGNWHCDSQWLGDRVITTSTRTWALPTYNNHLYKQISSQSGASNDNHYFGYSTPWGYFDFNRFHCHFSPRDWQRLINNNWGFRPKRLSFKLFNIQVKEVTDNNGVKTIANNLTSTVQVFTDSDYQLPYVLGSAHEGCLPPFPADVFMIPQYGYLTLNDGSQAVGRSSFYCLEYFPSQMLRTGNNFQFSYEFENVPFHSSYAHSQSLDRLMNPLIDQYLYYLSKTINGSGQNQQTLKFSVAGPSNMAVQGRNYIPGPSYRQQRVSTTVTQNNNSEFAWPGASSWALNGRNSLMNPGPAMASHKEGEDRFFPLSGSLIFGKQGTGRDNVDADKVMITNEEEIKTTNPVATESYGQVATNHQSAQAQAQTGWVQNQGILPGMVWQDRDVYLQGPIWAKIPHTDGNFHPSPLMGGFGLKHPPPQILIKNTPVPANPPAEFSATKFASFITQYSTGQVSVEIEWELQKENSKRWNPEVQYTSNYAKSANVDFTVDNNGLYTEPRPIGTRYLTKPL

SEQ ID NO: 352 - DNA, 2211 bp, Artificial Sequence
  Description of Artificial Sequence: Synthetic polynucleotide
atggctgccgatggttatcttccagattggctcgaggacaacctctctgagggcattcgcgagtggtgggacttgaaacctggagcccctaaacccaaggcaaatcaacaacatcaggacaacgctcgaggtcttgtgcttccgggttacaaataccttggacccggcaacggactcgacaagggggagccggtcaacgcagcagacgcggcggccctcgagcacgacaaggcctacgaccagcagctcaaggccggagacaacccgtacctcaagtacaaccacgccgacgccgagttccaggagcggctcaaagaagatacgtcttttgggggcaacctcgggcgagcagtcttccaggccaaaaagaggcttcttgaacctcttggtctggttgaggaagcggctaagacggctcctggaaagaagagaccggtagagccatcaccccagcgttctccagactcctctacgggcatcggcaagaaaggccaacagcccgctaaaaagagactcaattttggtcagactggcgactcagagtcagtccccgacccacaacctctcggagaacctccagcaacccccgctgctgtgggacctactacaatggcttcaggcggtggcgcaccaatggcagacaataacgagggtgccgatggagtgggtaattcctcaggaaattggcattgcgattcccaatggctgggcgacagagtcatcaccaccagcaccagaacctgggccctgcccacttacaacaaccatctctacaagcaaatctccagccaatcaggagcttcaaacgacaaccactactttggctacagcaccccttgggggtattttgactttaacagattccactgccacttttcaccacgtgactggcaaagactcatcaacaacaactggggattccgacccaagagactcaacttcaagctcttcaacatccaagtcaaggaggtcacgacgaatgatggcgtcacgaccatcgctaataaccttaccagcacggttcaagtcttctcggactcggagtaccagttgccgtacgtcctcggctctgcgcaccagggctgcctccctccgttcccggcggacgtgttcatgattccgcagtacggctacctaacgctcaacaatggcagccaagccgtgggacgttcatccttttactgcctggaatatttcccttctcagatgctgagaacgggcaacaactttaccttcagctacacttttgaggacgttcctttccacagcagctacgctcacagccagagtctggaccgtctcatgaatcctctcatcgaccagtacctgtattacttgagcagaacaaacactccaagtggaaccaccacgcagtcaaggcttcagttttctcaggccggagcgagtgacattcgggaccagtctaggaactggcttcctggaccctgttaccgccagcagcgcgtttctaaaacaaaaacagacaacaacaacagcaattttacctggactggtgcttcaaaatataaccttaatgggcgtgaatctataatcaaccctggcactgctatggcctcacacaaagacgacgaagacaagttctttcccatgagcggtgtcatgatttttggaaaagagagcgccggagcttcaaacactgcattggacaatgtcatgatcacagacgaagaggaaatcaaagccactaaccccgtggccaccgaaagatttgggactgtggcagtcaatctccagagcagcagcacagaccctgcgaccggagatgtgcatgttatgggagcattacctggcatggtgtggcaagatagagacgtgtacctgcagggtcccatttgggccaaaattcctcacacagatggacactttcacccgtctcctcttatgggcggctttggactcaagaacccgcctcctcagatcctcatcaaaaacacgcctgttcctgcgaatcctccggcggagttttcagctacaaagtttgcttcattcatcacccaatactccacaggacaagtgagtgtggaaattgaatgggagctgcagaaagaaaacagcaagcgctggaatcccgaagtgcagtacacatccaattatgcaaaatctgccaacgttgattttactgtggacaacaatggactttatactgagcctcgccccattggcacccgttaccttacccgtcccctgtaa

SEQ ID NO: 353 - protein, 736 aa, Artificial Sequence
  Description of Artificial Sequence: Synthetic polypeptide
MAADGYLPDWLEDNLSEGIREWWDLKPGAPKPKANQQHQDNARGLVLPGYKYLGPGNGLDKGEPVNAADAAALEHDKAYDQQLKAGDNPYLKYNHADAEFQERLKEDTSFGGNLGRAVFQAKKRLLEPLGLVEEAAKTAPGKKRPVEPSPQRSPDSSTGIGKKGQQPAKKRLNFGQTGDSESVPDPQPLGEPPATPAAVGPTTMASGGGAPMADNNEGADGVGNSSGNWHCDSQWLGDRVITTSTRTWALPTYNNHLYKQISSQSGASNDNHYFGYSTPWGYFDFNRFHCHFSPRDWQRLINNNWGFRPKRLNFKLFNIQVKEVTTNDGVTTIANNLTSTVQVFSDSEYQLPYVLGSAHQGCLPPFPADVFMIPQYGYLTLNNGSQAVGRSSFYCLEYFPSQMLRTGNNFTFSYTFEDVPFHSSYAHSQSLDRLMNPLIDQYLYYLSRTNTPSGTTTQSRLQFSQAGASDIRDQSRNWLPGPCYRQQRVSKTKTDNNNSNFTWTGASKYNLNGRESIINPGTAMASHKDDEDKFFPMSGVMIFGKESAGASNTALDNVMITDEEEIKATNPVATERFGTVAVNLQSSSTDPATGDVHVMGALPGMVWQDRDVYLQGPIWAKIPHTDGHFHPSPLMGGFGLKNPPPQILIKNTPVPANPPAEFSATKFASFITQYSTGQVSVEIEWELQKENSKRWNPEVQYTSNYAKSANVDFTVDNNGLYTEPRPIGTRYLTRPL

SEQ ID NO: 354 - DNA, 2214 bp, Artificial Sequence; identical to SEQ ID NO: 326
  Description of Artificial Sequence: Synthetic polynucleotide

SEQ ID NO: 355 - protein, 737 aa, Artificial Sequence; identical to SEQ ID NO: 327
  Description of Artificial Sequence: Synthetic polypeptide

SEQ ID NO: 356 - DNA, 2205 bp, Artificial Sequence
  Description of Artificial Sequence: Synthetic polynucleotide
atggctgctgacggttatcttccagattggctcgaggacaacctttctgaaggcattcgtgagtggtgggctctgaaacctggagtccctcaacccaaagcgaaccaacaacaccaggacaaccgtcggggtcttgtgcttccgggttacaaatacctcggacccggtaacggactcgacaaaggagagccggtcaacgaggcggacgcggcagccctcgaacacgacaaggcctacgaccagcagctcaaggccggagacaacccgtacctcaagtacaaccacgccgacgccgagttccaggagcggctcaaagaagatacgtcttttgggggcaacctcgggcgagcagtcttccaggccaaaaagaggcttcttgaacctcttggtctggttgaggaagcggctaagacggctcctggaaagaagaggcctgtagagcagtctcctcaggaaccggactcctccgcgggtattggcaaatcgggtgcacagcccgctaaaaagagactcaatttcggtcagactggcgacacagagtcagtcccagaccctcaaccaatcggagaacctcccgcagccccctcaggtgtgggatctcttacaatggcttcaggtggtggcgcaccagtggcagacaataacgaaggtgccgatggagtgggtagttcctcgggaaattggcattgcgattcccaatggctgggggacagagtcatcaccaccagcacccgaacctgggccctgcccacctacaacaaccacctctacaaacaaatttccagccaatcaggagcctcgaacgacaatcactactttggctacagcaccccttgggggtattttgacttcaacagattccactgccacttttcaccacgtgactggcagcgactcatcaacaacaactggggattccggcccaagagactcagcttcaagctcttcaacatccaggtcaaagaggttacggacaacaatggagtcaagaccatcgccaataaccttaccagcacggtccaggtcttcacggactcagactatcagctcccgtacgtgctcgggtcggctcacgagggctgcctcccgccgttcccagcggacgttttcatgattcctcagtacgggtatctgacgcttaatgatggaagccaggccgtgggtcgttcgtccttttactgcctggaatatttcccgtcgcaaatgctaagaacgggtaacaacttccagttcagctacgagtttgagaacgtacctttccatagcagctacgctcacagccaaagcctggaccgactaatgaatccactcatcgaccaatacttgtactatctctcaaagactattaacggttctggacagaatcaacaaacgctaaaattcagtgtggccggacccagcaacatggctgtccagggaagaaactacatacctggacccagctaccgacaacaacgtgtctcaaccactgtgactcaaaacaacaacagcgaatttgcttggcctggagcttcttcttgggctctcaatggacgtaatagcttgatgaatcctggacctgctatggccagccacaaagaaggagaggaccgtttctttcctttgtctggatctttaatttttggcaaacaaggaactggaagagacaacgtggatgcggacaaagtcatgataaccaacgaagaagaaattaaaactactaacccggtagcaacggagtcctatggacaagtggccacaaaccaccagagtgcccaagcacaggcgcagaccggctgggttcaaaaccaaggaatacttccgggtatggtttggcaggacagagatgtgtacctgcaaggacccatttgggccaaaattcctcacacggacggcaactttcacccttctccgctgatgggagggtttggaatgaaacacccgcctcctcagatcctcatcaaaaacacacctgtacctgcggatcctccaacggccttcaacaaggacaagctgaactctttcatcacccagtattctactggccaagtcagcgtggagatcgagtgggagctgcagaaggaaaacagcaagcgctggaaccccgagatccagtacacctccaactactacaaatctacaagtgtggactttgctgttaatacagaaggcgtgtactctgaaccccgccccattggcacccgttacctcacccgtaatctgtaa

SEQ ID NO: 357 - protein, 734 aa, Artificial Sequence
  Description of Artificial Sequence: Synthetic polypeptide
MAADGYLPDWLEDNLSEGIREWWALKPGVPQPKANQQHQDNRRGLVLPGYKYLGPGNGLDKGEPVNEADAAALEHDKAYDQQLKAGDNPYLKYNHADAEFQERLKEDTSFGGNLGRAVFQAKKRLLEPLGLVEEAAKTAPGKKRPVEQSPQEPDSSAGIGKSGAQPAKKRLNFGQTGDTESVPDPQPIGEPPAAPSGVGSLTMASGGGAPVADNNEGADGVGSSSGNWHCDSQWLGDRVITTSTRTWALPTYNNHLYKQISSQSGASNDNHYFGYSTPWGYFDFNRFHCHFSPRDWQRLINNNWGFRPKRLSFKLFNIQVKEVTDNNGVKTIANNLTSTVQVFTDSDYQLPYVLGSAHEGCLPPFPADVFMIPQYGYLTLNDGSQAVGRSSFYCLEYFPSQMLRTGNNFQFSYEFENVPFHSSYAHSQSLDRLMNPLIDQYLYYLSKTINGSGQNQQTLKFSVAGPSNMAVQGRNYIPGPSYRQQRVSTTVTQNNNSEFAWPGASSWALNGRNSLMNPGPAMASHKEGEDRFFPLSGSLIFGKQGTGRDNVDADKVMITNEEEIKTTNPVATESYGQVATNHQSAQAQAQTGWVQNQGILPGMVWQDRDVYLQGPIWAKIPHTDGNFHPSPLMGGFGMKHPPPQILIKNTPVPADPPTAFNKDKLNSFITQYSTGQVSVEIEWELQKENSKRWNPEIQYTSNYYKSTSVDFAVNTEGVYSEPRPIGTRYLTRNL

SEQ ID NO: 358 - DNA, 2217 bp, Artificial Sequence
  Description of Artificial Sequence: Synthetic polynucleotide
atggctgccgatggttatcttccagattggctcgaggacaacctctctgagggcattcgcgagtggtgggcgctgaaacctggagccccgaagcccaaagccaaccagcaaaagcaggacgacggccggggtctggtgcttcctggctacaagtacctcggacccttcaacggactcgacaagggggagcccgtcaacgcggcggacgcagcggccctcgagcacgacaaggcctacgaccagcagctgcaggcgggtgacaatccgtacctgcggtataaccacgccgacgccgagtttcaggagcgtctgcaagaagatacgtcttttgggggcaacctcgggcgagcagtcttccaggccaagaagcgggttctcgaacctctcggtctggttgaggaaggcgctaagacggctcctggaaagaagagaccggtagagccatcaccccagcgttctccagactcctctacgggcatcggcaagaaaggccaacagcccgccagaaaaagactcaattttggtcagactggcgactcagagtcagttccagaccctcaacctctcggagaacctccagcagcgccctctggtgtgggacctaatacaatggctgcaggcggtggcgcaccaatggcagacaataacgaaggcgccgacggagtgggtagttcctcgggaaattggcattgcgattccacatggctgggcgacagagtcatcaccaccagcacccgaacctgggccctgcccacctacaacaaccacctctacaagcaaatctccaacgggacatcgggaggagccaccaacgacaacacctacttcggctacagcaccccctgggggtattttgactttaacagattccactgccacttttcaccacgtgactggcagcgactcatcaacaacaactggggattccggcccaagagactcagcttcaagctcttcaacatccaggtcaaggaggtcacgcagaatgaaggcaccaagaccatcgccaataacctcaccagcaccatccaggtgtttacggactcggagtaccagctgccgtacgttctcggctctgcccaccagggctgcctgcctccgttcccggcggacgtgttcatgattccccagtacggctacctaacactcaacaacggtagtcaggccgtgggacgctcctccttctactgcctggaatactttccttcgcagatgctgagaaccggcaacaacttccagtttacttacaccttcgaggacgtgcctttccacagcagctacgcccacagccagagcttggaccggctgatgaatcctctgattgaccagtacctgtactacttgtctcggactcaaacaacaggaggcacggcaaatacgcagactctgggcttcagccaaggtgggcctaatacaatggccaatcaggcaaagaactggctgccaggaccctgttaccgccaacaacgcgtctcaacgacaaccgggcaaaacaacaatagcaactttgcctggactgctgggaccaaataccatctgaatggaagaaattcattggctaatcctggcatcgctatggcaacacacaaagacgacgaggagcgtttttttcccagtaacgggatcctgatttttggcaaacaaaatgctgccagagacaatgcggattacagcgatgtcatgctcaccagcgaggaagaaatcaaaaccactaaccctgtggctacagaggaatacggtatcgtggcagataacttgcagcagcaaaacacggctcctcaaattggaactgtcaacagccagggggccttacccggtatggtctggcagaaccgggacgtgtacctgcagggtcccatctgggccaagattcctcacacggacggcaacttccacccctctcccctcatgggtggattcggacttaaacatcctccgcctcagatcctgatcaagaacacgcctgtacctgcggatcctccgaccaccttcaaccagtcaaagctgaactctttcatcacgcaatacagcaccggacaggtcagcgtggaaattgaatgggagctgcagaaggaaaacagcaagcgctggaaccccgagatccagtacacctccaactactacaaatctacaagtgtggactttgctgttaatacagaaggcgtgtactctgaaccccgccccattggcacccgttacctcacccgtaatctgtaa

SEQ ID NO: 359 - protein, 738 aa, Artificial Sequence; identical to SEQ ID NO: 105
  Description of Artificial Sequence: Synthetic polypeptide

SEQ ID NO: 360 - DNA, 2211 bp, Artificial Sequence
  Description of Artificial Sequence: Synthetic polynucleotide
atggctgctgacggttatcttccagattggctcgaggacaacctttctgaaggcattcgagagtggtgggcgctgcaacctggagcccctaaacccaaggcaaatcaacaacatcaggacaacgctcggggtcttgtgcttccgggttacaaatacctcggacccggcaacggactcgacaagggggaacccgtcaacgcagcggacgcggcagccctcgagcacgacaaggcctacgaccagcagctcaaggccggtgacaacccctacctcaagtacaaccacgccgacgccgagttccaggagcggctcaaagaagatacgtcttttgggggcaacctcgggcgagcagtcttccaggccaaaaagaggcttcttgaacctcttggtctggttgaggaagcggctaagacggctcctggaaagaagaggcctgtagatcagtctcctcaggaaccggactcatcatctggtgttggcaaatcgggcaaacagcctgccagaaaaagactaaatttcggtcagactggcgactcagagtcagtcccagaccctcaacctctcggagaaccaccagcagcccccacaagtttgggatctaatacaatggcttcaggcggtggcgcaccaatggcagacaataacgagggtgccgatggagtgggtaattcctcaggaaattggcattgcgattcccaatggctgggcgacagagtcatcaccaccagcaccagaacctgggccctgcccacttacaacaaccatctctacaagcaaatctccagccaatcaggagcttcaaacgacaaccactactttggctacagcaccccttgggggtattttgactttaacagattccactgccacttctcaccacgtgactggcagcgactcattaacaacaactggggattccggcccaagaaactcagcttcaagctcttcaacatccaagttaaagaggtcacgcagaacgatggcacgacgactattgccaataaccttaccagcacggttcaggtgtttacggactcggagtatcagctcccgtacgtgctcgggtcggcgcaccaaggctgtctcccgccgtttccagcggacgtcttcatggtccctcagtatggatacctcaccctgaacaacggaagtcaagcggtgggacgctcatccttttactgcctggagtacttcccttcgcagatgctaaggactggaaataacttccaattcagctataccttcgaggatgtaccttttcacagcagctacgctcacagccagagtttggatcgcttgatgaatcctcttattgatcagtatctgtactacctgaacagaacgcaaggaacaacctctggaacaaccaaccaatcacggctgctttttagccaggctgggcctcagtctatgtctttgcaggccagaaattggctacctgggccctgctaccggcaacagagactttcaaagactgctaacgacaacaacaacagtaactttccttggacagcggccagcaaatatcatctcaatggccgcgactcgctggtgaatccaggaccagctatggccagtcacaaggacgatgaagaaaaatttttccctatgcacggcaatctaatatttggcaaagaagggacaacggcaagtaacgcagaattagataatgtaatgattacggatgaagaagagattcgtaccaccaatcctgtggcaacagagcagtatggaactgtggcaaataacttgcagagctcaaatacagctcccacgactagaactgtcaatgatcagggggccttacctggcatggtgtggcaagatcgtgacgtgtaccttcaaggacctatctgggcaaagattcctcacacggatggacactttcatccttctcctctgatgggaggctttggactgaaacatccgcctcctcaaatcatgatcaaaaatactccggtaccggcaaatcctccgacgactttcagcccggccaagtttgcttcatttatcactcagtactccactggacaggtcagcgtggaaattgagtgggagctacagaaagaaaacagcaaacgttggaatccagagattcagtacacttccaactacaacaagtctgttaatgtggactttactgtagacactaatggtgtttatagtgaacctcgccccattggcacccgttaccttacccgtcccctgtaa

SEQ ID NO: 361 - protein, 736 aa, Artificial Sequence; identical to SEQ ID NO: 331
  Description of Artificial Sequence: Synthetic polypeptide

SEQ ID NO: 362 - DNA, 2211 bp, Artificial Sequence; identical to SEQ ID NO: 330
  Description of Artificial Sequence: Synthetic polynucleotide

SEQ ID NO: 363 - protein, 736 aa, Artificial Sequence; identical to SEQ ID NO: 331
  Description of Artificial Sequence: Synthetic polypeptide

SEQ ID NO: 364 - DNA, 2211 bp, Artificial Sequence
  Description of Artificial Sequence: Synthetic polynucleotide
atggctgctgacggttatcttccagattggctcgaggacaacctttctgaaggcattcgtgagtggtgggctctgaaacctggagtccctcaacccaaagcgaaccaacaacaccaggacaaccgtcggggtcttgtgcttccgggttacaaatacctcggacccggtaacggactcgacaaaggagagcccgtcaacgcggcggatgcagcggccctcgagcacgacaaggcctacgaccagcagctcaaagcgggtgacaatccgtacctgcggtataaccacgccgacgccgagtttcaggagcgtctgcaagaagatacgtcttttgggggcaacctcgggcgagcagtcttccaggccaagaagagggttctcgaaccttttggtctggttgaggaaggtgctaagacggctcctggaaagaaacgtccggtagagcagtcgccacaagagccagactcctcctcgggcatcggcaagacaggccagcagcccgctaaaaagagactcaattttggtcagactggcgactcagagtcagtccccgacccacaacctctcggagaacctccagcaacccccgctgctgtgggacctactacaatggcttcaggcggtggcgcaccaatggcagacaataacgaaggcgccgacggagtgggtaatgcctcaggaaattggcattgcgattccacatggctgggcgacagagtcatcaccaccagcacccgcacctgggccttgcccacctacaataaccacctctacaagcaaatctccagtgcttcaacgggggccagcaacgacaaccactacttcggctacagcaccccctgggggtattttgatttcaacagattccactgccatttctcaccacgtgactggcagcgactcatcaacaacaattggggattccggcccaagagactcaacttcaagctcttcaacatccaagtcaaggaggtcacgacgaatgatggcgtcacgaccatcgctaataaccttaccagcacggttcaagtcttctcggactcggagtaccagcttccgtacgtcctcggctctgcgcaccagggctgcctccctccgttcccggcggacgtgttcatgattccgcaatacggctacctgacgctcaacaatggcagccaagccgtgggacgttcatccttttactgcctggaatatttcccttctcagatgctgagaacgggcaacaactttaccttcagctacacctttgaggaagtgcctttccacagcagctacgcgcacagccagagcctggaccggctgatgaatcctctcatcgaccaatacctgtattacctgaacagaactcaaaatcagtccggaagtgcccaaaacaaggacttgctgtttagccgtgggtctccagctggcatgtctgttcagcccaaaaactggctacctggaccctgttatcggcagcagcgcgtttctaaaacaaaaacagacaacaacaacagcaattttacctggactggtgcttcaaaatataacctcaatgggcgtgaatccatcatcaaccctggcactgctatggcctcacacaaagacgacgaagacaagttctttcccatgagcggtgtcatgatttttggaaaagagagcgccggagcttcaaacactgcattggacaatgtcatgattacagacgaagaggaaattaaagccactaaccctgtggccaccgaaagatttgggaccgtggcagtcaatttccagagcagcagcacagaccctgcgaccggagatgtgcatgttatgggagccttacctggaatggtgtggcaagacagagacgtatacctgcagggtcctatttgggccaaaattcctcacacggatggacactttcacccgtctcctctcatgggcggctttggacttaagcacccgcctcctcagatcctcatcaaaaacacgcctgttcctgcgaatcctccggcagagttttcggctacaaagtttgcttcattcatcacccagtattccacaggacaagtgagcgtggagattgaatgggagctgcagaaagaaaacagcaaacgctggaatcccgaagtgcagtatacatctaactatgcaaaatctgccaacgttgatttcactgtggacaacaatggactttatactgagcctcgccccattggcacccgttacctcacccgtcccctgtaa

SEQ ID NO: 365 - protein, 736 aa, Artificial Sequence
  Description of Artificial Sequence: Synthetic polypeptide
MAADGYLPDWLEDNLSEGIREWWALKPGVPQPKANQQHQDNRRGLVLPGYKYLGPGNGLDKGEPVNAADAAALEHDKAYDQQLKAGDNPYLRYNHADAEFQERLQEDTSFGGNLGRAVFQAKKRVLEPFGLVEEGAKTAPGKKRPVEQSPQEPDSSSGIGKTGQQPAKKRLNFGQTGDSESVPDPQPLGEPPATPAAVGPTTMASGGGAPMADNNEGADGVGNASGNWHCDSTWLGDRVITTSTRTWALPTYNNHLYKQISSASTGASNDNHYFGYSTPWGYFDFNRFHCHFSPRDWQRLINNNWGFRPKRLNFKLFNIQVKEVTTNDGVTTIANNLTSTVQVFSDSEYQLPYVLGSAHQGCLPPFPADVFMIPQYGYLTLNNGSQAVGRSSFYCLEYFPSQMLRTGNNFTFSYTFEEVPFHSSYAHSQSLDRLMNPLIDQYLYYLNRTQNQSGSAQNKDLLFSRGSPAGMSVQPKNWLPGPCYRQQRVSKTKTDNNNSNFTWTGASKYNLNGRESIINPGTAMASHKDDEDKFFPMSGVMIFGKESAGASNTALDNVMITDEEEIKATNPVATERFGTVAVNFQSSSTDPATGDVHVMGALPGMVWQDRDVYLQGPIWAKIPHTDGHFHPSPLMGGFGLKHPPPQILIKNTPVPANPPAEFSATKFASFITQYSTGQVSVEIEWELQKENSKRWNPEVQYTSNYAKSANVDFTVDNNGLYTEPRPIGTRYLTRPL

SEQ ID NO: 366 - DNA, 2217 bp, Artificial Sequence
  Description of Artificial Sequence: Synthetic polynucleotide
atggctgccgatggttatcttccagattggctcgaggacaacctctctgagggcattcgcgagtggtgggacttgaaacctggagccccgaaacccaaagccaaccagcaaaagcaggacgacggccggggtctggtgcttcctggctacaagtacctcggacccttcaacggactcgacaagggggagcccgtcaacgcggcggatgcaacggccctcgagcacgacaaggcctacgaccagcagctgcaggcgggtgacaatccgtacctgcggtataaccacgccgacgccgagtttcaggagcgtctgcaagaagatacgtcttttgggggcaacctcgggcgagcagtcttccaggccaagaagcgggttctcgaacctctcggtctggttgaggaaggcgctaagacggctcctggaaagaagagaccggtagagccatcaccccagcgttctccagactcctctacgggcatcggcaagaaaggccaacagcccgccagaaaaagactcaattttggtcagactggcgactcagagtcagttccagaccctcaacctctcggagaaccaccagcagcccccacaagtttgggatctaatacaatggcttcaggcggtggcgcaccaatggcagacaataacgagggtgccgatggagtgggtaattcctcaggaaattggcattgcgattcccaatggctgggcgacagagtcatcaccaccagcacccgcacctgggccttgcccacctacaataaccacctctacaagcaaatctccagtgcttcaacgggggccagcaacgacaaccactacttcggctacagcaccccctgggggtattttgactttaaccgcttccactgccacttctcgccaagagactggcaaagactcatcaacaacaattggggattccggcccaagagactcaacttcaaactcttcaacatccaagtcaaggaggtcacgacgaatgatggcgtcacgaccatcgccaataacctcaccagcaccatccaggtgtttacggactcggagtaccagctgccgtacgttctcggctctgcccaccagggctgcctgcctccgttcccggcggacgtgttcatgattccccagtatggatacctcaccctgaacaacggaagtcaagcggtgggacgctcatccttttactgcctggagtacttcccttcgcagatgctaaggactggaaataacttccaattcagctataccttcgaggatgtaccttttcacagcagctacgctcacagccagagtttggatcgcttgatgaatcctcttattgatcagtatctgtactacctgaacagaacgcaaggaacaacctctggaacaaccaaccaatcacggctgctttttagccaggctgggcctcagtctatgtctttgcaggccagaaattggctacctgggccctgctaccggcaacagagactttcaaagactgctaacgacaacaacaacagtaactttccttggacagcagccagcaaatatcatctcaatggccgcgactcgctggtgaatccaggaccagctatggccagtcacaaggacgatgaagaaaaatttttccctatgcacggcaatctaatatttggcaaagaagggacaacggcaagtaacgcagaattagataatgtaatgattacggatgaagaagagattcgtaccaccaatcctgtggcaacagagcagtatggaactgtggcaaataacttgcagagctcaaatacagctcccacgactagaactgtcaatgatcagggggccttacctggcatggtgtggcaagatcgtgacgtgtaccttcaggggcccatctgggcaaagattccacacacggacggacattttcacccctctcccctcatgggtggattcggacttaaacaccctcctccgcagattctcatcaagaacaccccggtacctgcgaatccttcgaccaccttcagtgcggcaaagtttgcttccttcatcacacagtactccacgggacaggtcagcgtggagatcgagtgggagctgcagaaggaaaacagcaagcgctggaacccggagatccagtacacttccaactattacaagtctaataatgttgaatttgctgttaatactgaaggtgtatatagtgaaccccgccccattggcaccagatacctgactcgtaatctgtaa

SEQ ID NO: 367 - protein, 738 aa, Artificial Sequence
  Description of Artificial Sequence: Synthetic polypeptide
MAADGYLPDWLEDNLSEGIREWWDLKPGAPKPKANQQKQDDGRGLVLPGYKYLGPFNGLDKGEPVNAADATALEHDKAYDQQLQAGDNPYLRYNHADAEFQERLQEDTSFGGNLGRAVFQAKKRVLEPLGLVEEGAKTAPGKKRPVEPSPQRSPDSSTGIGKKGQQPARKRLNFGQTGDSESVPDPQPLGEPPAAPTSLGSNTMASGGGAPMADNNEGADGVGNSSGNWHCDSQWLGDRVITTSTRTWALPTYNNHLYKQISSASTGASNDNHYFGYSTPWGYFDFNRFHCHFSPRDWQRLINNNWGFRPKRLNFKLFNIQVKEVTTNDGVTTIANNLTSTIQVFTDSEYQLPYVLGSAHQGCLPPFPADVFMIPQYGYLTLNNGSQAVGRSSFYCLEYFPSQMLRTGNNFQFSYTFEDVPFHSSYAHSQSLDRLMNPLIDQYLYYLNRTQGTTSGTTNQSRLLFSQAGPQSMSLQARNWLPGPCYRQQRLSKTANDNNNSNFPWTAASKYHLNGRDSLVNPGPAMASHKDDEEKFFPMHGNLIFGKEGTTASNAELDNVMITDEEEIRTTNPVATEQYGTVANNLQSSNTAPTTRTVNDQGALPGMVWQDRDVYLQGPIWAKIPHTDGHFHPSPLMGGFGLKHPPPQILIKNTPVPANPSTTFSAAKFASFITQYSTGQVSVEIEWELQKENSKRWNPEIQYTSNYYKSNNVEFAVNTEGVYSEPRPIGTRYLTRNL

SEQ ID NO: 368 - DNA, 2208 bp, Artificial Sequence
  Description of Artificial Sequence: Synthetic polynucleotide
atggctgccgatggttatcttccagattggctcgaggacaaccttagtgaaggaattcgcgagtggtgggacttgaaacctggagccccgaagcccaaagccaaccagcaaaagcaggacgacggccggggtctggtgcttcctggctacaagtacctcggacccttcaacggactcgacaagggggagcccgtcaacgcggcggacgcagcggccctcgagcacgacaaggcctacgaccagcagctcaaagcgggtgacaatccgtacctgcggtataaccacgccgacgccgagtttcaggagcgtctgcaagaagatacgtcttttgggggcaacctcgggcgagcagtcttccaggccaagaagcgggttctcgaacctctcggtctggttgaggaaggtgctaagacggctcctggaaagaaacgtccggtagagcagtcgccacaagagccagactcctcctcgggcattggcaagacaggccagcagcccgctaaaaagagactcaattttggtcagactggcgactcagagtcagtccccgacccacaacctctcggagaacctccagcaacccccgctgctgtgggacctactacaatggcttcaggcggtggcgcaccaatggcagacaataacgaaggcgccgacggagtgggtaatgcctcaggaaattggcattgcgattccacatggctgggcgacagagtcatcaccaccagcacccgaacctgggccctgcccacctacaacaaccacctctacaaacaaatttccagccaatcaggagcctcgaacgacaatcactactttggctacagcaccccttgggggtattttgatttcaacagattccactgccacttttcaccacgtgactggcagcgactcatcaacaacaattggggattccggcccaagagactcagcttcaagctcttcaacatccaggtcaaggaggtcacgcagaatgaaggcaccaagaccatcgccaataaccttaccagcacggttcaagtgtttacggactcggagtatcagctcccgtacgtgctcggctcggcgcatcaaggatgcctcccgccgttcccagcagacgtcttcatggtgccacagtatggatacctcaccctgaacaacgggagtcaggcagtaggacgctcttcattttactgcctggagtactttccttctcagatgctgcgtaccggaaacaactttaccttcagctacacttttgaggacgttcctttccacagcagctacgctcacagccagagtctggaccgtctcatgaatcctctgattgaccagtacctgtattacttgagcagaacaaacactccaagtggaaccaccacgcagtcaaggcttcagttttctcaggccggagcgagtgacattcgggaccagtctaggaactggcttcctggaccctgttaccgccagcagcgagtatcaaagacatctgcggataacaacaacagtgaatactcgtggactggagctaccaagtaccacctcaatggcagagactctctggtgaatccgggcccggccatggcaagccacaaggactatgaagaaaagttttttcctcagagcggggttctcatctttgggaagcaaggctcagagaaaacaaatgtggacattgaaaaggtcatgattacagacgaagaggaaatcaggacaaccaatcccgtggctacggagcagtatggttctgtatctaccaacctccagagaggcaacagacaagcagctaccgcagatgtcaacacacaaggcgttcttccaggcatggtctggcaggacagagatgtgtaccttcaggggcccatctgggcaaagattccacacacggacggacattttcacccgtctccgctgatgggcggctttggcctgaaacatcctccgcctcagatcctgatcaagaacacgcctgtacctgcggatcctccgaccaccttcaaccagtcaaagctgaactctttcatcactcagtattctactggccaagtcagcgtggagatcgagtgggagctgcagaaggaaaacagcaagcgctggaaccccgagatccagtacacctccaactactacaaatctacaagtgtggactttgctgttaatacagaaggcgtgtactctgaaccccgccccattggcacccgttacctcacccgtaatctgtaa

SEQ ID NO: 369 - protein, 735 aa, Artificial Sequence
  Description of Artificial Sequence: Synthetic polypeptide
MAADGYLPDWLEDNLSEGIREWWDLKPGAPKPKANQQKQDDGRGLVLPGYKYLGPFNGLDKGEPVNAADAAALEHDKAYDQQLKAGDNPYLRYNHADAEFQERLQEDTSFGGNLGRAVFQAKKRVLEPLGLVEEGAKTAPGKKRPVEQSPQEPDSSSGIGKTGQQPAKKRLNFGQTGDSESVPDPQPLGEPPATPAAVGPTTMASGGGAPMADNNEGADGVGNASGNWHCDSTWLGDRVITTSTRTWALPTYNNHLYKQISSQSGASNDNHYFGYSTPWGYFDFNRFHCHFSPRDWQRLINNNWGFRPKRLSFKLFNIQVKEVTQNEGTKTIANNLTSTVQVFTDSEYQLPYVLGSAHQGCLPPFPADVFMVPQYGYLTLNNGSQAVGRSSFYCLEYFPSQMLRTGNNFTFSYTFEDVPFHSSYAHSQSLDRLMNPLIDQYLYYLSRTNTPSGTTTQSRLQFSQAGASDIRDQSRNWLPGPCYRQQRVSKTSADNNNSEYSWTGATKYHLNGRDSLVNPGPAMASHKDYEEKFFPQSGVLIFGKQGSEKTNVDIEKVMITDEEEIRTTNPVATEQYGSVSTNLQRGNRQAATADVNTQGVLPGMVWQDRDVYLQGPIWAKIPHTDGHFHPSPLMGGFGLKHPPPQILIKNTPVPADPPTTFNQSKLNSFITQYSTGQVSVEIEWELQKENSKRWNPEIQYTSNYYKSTSVDFAVNTEGVYSEPRPIGTRYLTRNL

SEQ ID NO: 370 - DNA, 2214 bp, Artificial Sequence
  Description of Artificial Sequence: Synthetic polynucleotide
atggctgccgatggttatcttccagattggctcgaggacaacctctctgagggcattcgcgagtggtgggacttgaaacctggagccccgaaacccaaagccaaccagcaaaagcaggacgacggccggggtctggtgcttcctggctacaagtacctcggacccttcaacggactcgacaagggggagcccgtcaacgcggcggatgcagcggccctcgagcacgacaaggcctacgaccagcagctcaaagcgggtgacaatccgtacctgcggtataaccacgccgacgccgagtttcaggagcgtctgcaagaagatacgtcttttgggggcaacctcgggcgagcagtcttccaggccaagaagagggttctcgaaccttttggtctggttgaggaaggtgctaagacggctcctggaaagaaacgtccggtagagcagtcgccacaagagccagactcctcctcgggcattggcaagacaggccagcagcctgcaagaaaaagattgaattttggtcagactggagacgcagactcagtacctgacccccagcctctcggacagccaccagcagccccctctggtctgggaactaatacgatggctacaggcagtggcgcaccaatggcagacaataacgagggcgccgacggagtgggtaattcctcgggaaattggcattgcgattcccaatggctgggggacagagtcatcaccaccagcacccgaacctgggccctgcccacctacaacaatcacctctacaagcaaatctccaacagcacatctggaggatcttcaaatgacaacgcctacttcggctacagcaccccctgggggtattttgatttcaacagattccactgccatttctcaccacgtgactggcagcgactcatcaacaacaattggggattccggcccaagagactcaacttcaagctcttcaacatccaggtcaaggaggtcacgcagaatgaaggcaccaagaccatcgccaataacctcaccagcaccatccaggtgtttacggactcggagtaccagctgccgtacgttctcggctctgcccaccagggctgcctgcctccgttcccggcggacgtgttcatgattccccagtacggctacctaacactcaacaacggtagtcaggccgtgggacgctcctccttctactgcctggaatactttccttcgcagatgctgagaaccggcaacaacttccagtttacttacaccttcgaggacgtgcctttccacagcagctacgcccacagccagagcttggaccggctgatgaatcctctgattgaccagtacctgtactacttgtctcggactcaaacaacaggaggcacgacaaatacgcagactctgggcttcagccaaggtgggcctaatacaatggccaatcaggcaaagaactggctgccaggaccctgttaccgccagcagcgagtatcaaagacatttgcggataacaacaacagtgaatactcgtggactggagctaccaagtaccacctcaatggcagagactctctggtgaatccgggcccggccatggcaagccacaaggacgatgaagaaaagttttttcctcagagcggggttctcatctttgggaagcaaggctcagagaaaacaaatgtggacattgaaaaggtcatgattacagacgaagaggaaatcaggacaaccaatcccgtggctacggagcagtatggttctgtatctaccaacctccagagaggcaacagacaagcagctaccgcagatgtcaacacacaaggcgttcttccaggcatggtctggcaggacagagatgtgtaccttcaggggcccatctgggcaaagattccacacacggacggacattttcacccctctcccctcatgggtggattcggacttaaacaccctccgcctcagatcctgatcaagaacacgcctgtacccgcggatcctccgaccaccttcaaccagtcaaagctgaactctttcatcacccagtattctactggccaagtcagcgtggagatcgagtgggagctgcagaaggaaaacagcaagcgctggaaccccgagatccagtacacctccaactactacaaatctacaagtgtggactttgctgttaatacagaaggcgtgtactctgaaccccgccccattggcacccgttacctcacccgtaatctgtaa

SEQ ID NO: 371 - protein, 737 aa, Artificial Sequence
  Description of Artificial Sequence: Synthetic polypeptide
MAADGYLPDWLEDNLSEGIREWWDLKPGAPKPKANQQKQDDGRGLVLPGYKYLGPFNGLDKGEPVNAADAAALEHDKAYDQQLKAGDNPYLRYNHADAEFQERLQEDTSFGGNLGRAVFQAKKRVLEPFGLVEEGAKTAPGKKRPVEQSPQEPDSSSGIGKTGQQPARKRLNFGQTGDADSVPDPQPLGQPPAAPSGLGTNTMATGSGAPMADNNEGADGVGNSSGNWHCDSQWLGDRVITTSTRTWALPTYNNHLYKQISNSTSGGSSNDNAYFGYSTPWGYFDFNRFHCHFSPRDWQRLINNNWGFRPKRLNFKLFNIQVKEVTQNEGTKTIANNLTSTIQVFTDSEYQLPYVLGSAHQGCLPPFPADVFMIPQYGYLTLNNGSQAVGRSSFYCLEYFPSQMLRTGNNFQFTYTFEDVPFHSSYAHSQSLDRLMNPLIDQYLYYLSRTQTTGGTTNTQTLGFSQGGPNTMANQAKNWLPGPCYRQQRVSKTFADNNNSEYSWTGATKYHLNGRDSLVNPGPAMASHKDDEEKFFPQSGVLIFGKQGSEKTNVDIEKVMITDEEEIRTTNPVATEQYGSVSTNLQRGNRQAATADVNTQGVLPGMVWQDRDVYLQGPIWAKIPHTDGHFHPSPLMGGFGLKHPPPQILIKNTPVPADPPTTFNQSKLNSFITQYSTGQVSVEIEWELQKENSKRWNPEIQYTSNYYKSTSVDFAVNTEGVYSEPRPIGTRYLTRNL

SEQ ID NO: 372 - DNA, 2217 bp, Artificial Sequence
  Description of Artificial Sequence: Synthetic polynucleotide
atggctgccgatggttatcttccagattggctcgaggacactctctctgaaggaataagacagtggtgggcgctgaaacctggagccccgaagcccaaagccaaccagcaaaagcaggacgacggccggggtctggtgcttcctggctacaagtacctcggacccttcaacggactcgacaagggggagcccgtcaacgcggcggatgcagcggccctcgagcacgacaaggcctacgaccagcagctcaaagcgggtgacaatccgtacctgcggtataaccacgccgacgccgagtttcaggagcgtctgcaagaagatacgtcttttgggggcaacctcgggcgagcagtcttccaggccaagaagcgggttctcgaacctctcggtctggttgaggaaggcgctaagacggctcctggaaagaagagaccggtagagccatcaccccagcgttctccagactcctctacgggcatcggcaagaaaggccaacagcccgccagaaaaagactcaattttggtcagactggcgactcagagtcagttccagaccctcaacctctcggagaaccaccagcagcccccacaagtttgggatctaatacaatggcttcaggcggtggcgcaccaatggcagacaataacgagggtgccgatggagtgggtaattcctcaggaaattggcattgcgattcccaatggctgggcgacagagtcatcaccaccagcacccgcacctgggccttgcccacctacaataaccacctctacaagcaaatctccagtgcttcaacgggggccagcaacgacaaccactacttcggctacagcaccccctgggggtattttgactttaaccgcttccactgccacttctcgccaagagactggcaaagactcatcaacaacaattggggattccggcccaagagactcaacttcaaactcttcaacatccaagtcaaggaggtcacgacgaatgatggcgtcacgaccatcgccaataacctcaccagcaccatccaggtgtttacggactcggagtaccagctgccgtacgttctcggctctgcccaccagggctgcctgcctccgttcccggcggacgtgttcatgattccccagtatggatacctcaccctgaacaacggaagtcaagcggtgggacgctcatccttttactgcctggagtacttcccttcgcagatgctaaggactggaaataacttccaattcagctataccttcgaggatgtaccttttcacagcagctacgctcacagccagagtttggatcgcttgatgaatcctcttattgatcagtatctgtactacctgaacagaacgcaaggaacaacctctggaacaaccaaccaatcacggctgctttttagccaggctgggcctcagtctatgtctttgcaggccagaaattggctacctgggccctgctaccggcaacagagactttcaaagactgctaacgacaacaacaacagtaactttccttggacagcagccagcaaatatcatctcaatggccgcgactcgctggtgaatccaggaccagctatggccagtcacaaggacgatgaagaaaaatttttccctatgcacggcaatctaatatttggcaaagaagggacaacggcaagtaacgcagaattagataatgtaatgattacggatgaagaagagattcgtaccaccaatcctgtggcaacagagcagtatggaactgtggcaaataacttgcagagctcaaatacagctcccacgactagaactgtcaatgatcagggggccttacctggcatggtgtggcaagatcgtgacgtgtaccttcaggggcccatctgggcaaagattccacacacggacggacattttcacccctctcccctcatgggtggattcggacttaaacaccctcctccgcagattctcatcaagaacaccccggtacctgcgaatccttcgaccaccttcagtgcggcaaagtttgcttccttcatcacacagtactccacgggacaggtcagcgtggagatcgagtgggagctgcagaaggaaaacagcaagcgctggaacccggagatccagtacacttccaactattacaagtctaataatgttgaatttgctgttaatactgaaggtgtatatagtgaaccccgccccattggcaccagatacctgactcgtaatctgtaa

SEQ ID NO: 373 - protein, 738 aa, Artificial Sequence
  Description of Artificial Sequence: Synthetic polypeptide
MAADGYLPDWLEDTLSEGIRQWWALKPGAPKPKANQQKQDDGRGLVLPGYKYLGPFNGLDKGEPVNAADAAALEHDKAYDQQLKAGDNPYLRYNHADAEFQERLQEDTSFGGNLGRAVFQAKKRVLEPLGLVEEGAKTAPGKKRPVEPSPQRSPDSSTGIGKKGQQPARKRLNFGQTGDSESVPDPQPLGEPPAAPTSLGSNTMASGGGAPMADNNEGADGVGNSSGNWHCDSQWLGDRVITTSTRTWALPTYNNHLYKQISSASTGASNDNHYFGYSTPWGYFDFNRFHCHFSPRDWQRLINNNWGFRPKRLNFKLFNIQVKEVTTNDGVTTIANNLTSTIQVFTDSEYQLPYVLGSAHQGCLPPFPADVFMIPQYGYLTLNNGSQAVGRSSFYCLEYFPSQMLRTGNNFQFSYTFEDVPFHSSYAHSQSLDRLMNPLIDQYLYYLNRTQGTTSGTTNQSRLLFSQAGPQSMSLQARNWLPGPCYRQQRLSKTANDNNNSNFPWTAASKYHLNGRDSLVNPGPAMASHKDDEEKFFPMHGNLIFGKEGTTASNAELDNVMITDEEEIRTTNPVATEQYGTVANNLQSSNTAPTTRTVNDQGALPGMVWQDRDVYLQGPIWAKIPHTDGHFHPSPLMGGFGLKHPPPQILIKNTPVPANPSTTFSAAKFASFITQYSTGQVSVEIEWELQKENSKRWNPEIQYTSNYYKSNNVEFAVNTEGVYSEPRPIGTRYLTRNL

SEQ ID NO: 374 - DNA, 2208 bp, Artificial Sequence; identical to SEQ ID NO: 10
  Description of Artificial Sequence: Synthetic polynucleotide

SEQ ID NO: 375 - protein, 735 aa, Artificial Sequence [sequence omitted]

SEQ ID NO: 376 - DNA, 2208 bp, Artificial Sequence
  Description of Artificial Sequence: Synthetic polynucleotide
atggctgccgatggttatcttccagattggctcgaggacaacctctctgagggcattcgcgagtggtgggcgctgaaacctggagccccgaagcccaaagccaaccagcaaaagcaggacgacggccggggtctggtgcttcctggctacaagtacctcggacccttcaacggactcgacaagggggagcccgtcaacgcggcggacgccgcggccctcgagcacgacaaggcctacgaccagcagctgcaggcgggtgacaatccgtacctgcggtataaccacgccgacgccgagtttcaggagcgtctgcaagaagatacgtcttttgggggcaacctcgggcgagcagtcttccaggccaaaaagaggcttcttgaacctcttggtctggttgaggaagcagctaaaacggctcctggaaagaagaggcctgtagagcagtctcctcaggaaccggactcctccgcgggtattggcaaatcgggtgcacagcccgccaaaaagagactcaatttcggtcagactggcgactcagagtcagtcccagaccctcaacctctcggagaaccaccagcagcccccacaagtttgggatctaatacaatggcttcaggcggtggcgcaccaatggcagacaataacgaaggcgccgacggagtgggtaatgcctcaggaaattggcattgcgattccacatggctgggcgacagagtcatcaccaccagcacccgcacctgggccttgcccacctacagcaaccatctctacaagcaaatctccagccaatcaggagcttcaaacgacaacgactactttggctacagcaccccttgggggtattttgatttcaacagattccactgccacttttcaccacgtgactggcaaagactcatcaacaacaactggggattccgacccaagagactcaacttcaagctctttaacattcaagtcaaagaggtcacgcagaatgacggtacgacgacgattgccaataaccttaccagcacggttcaggtgtttactgactcggagtaccagctcccgtacgtcctcggctcggcgcatcaaggatgcctcccgccgttcccagcagacgtcttcatggtgccacagtatggatacctcaccctgaacaacgggagtcaggcagtaggacgctcttcattttactgcctggagtactttccttctcagatgctgcgtaccggaaacaactttaccttcagctacacttttgaggacgttcctttccacagcagctacgctcacagccagagtctggaccgtctcatgaatcctctcatcgaccagtacctgtattacttgagcagaacaaacactccaagtggaaccaccacgcagtcaaggcttcagttttctcaggccggagcgagtgacattcgggaccagtctaggaactggcttcctggaccctgttaccgccagcagcgagtatcaaagacatctgaggataacaacaacagtgaatactcgtggactggagctaccaagtaccacctcaatggcagagactctctggtgaatccgggcccggccatggcaagccacaaggacgatgaagaaaagttttttcctcagagcggggttctcatctttgggaagcaaggctcagagaaaacaaatgtggacattgaaaaggtcatgattacagacgaagaggaaatcaggacaaccaatcccgtggctacggagcagtatggttctgtatctaccaacctccagagaggcaacagacaagcagctaccgcagatgtcaacacacaaggcgttcttccaggcatggtctggcaggacagagatgtgtaccttcaggggcccatctgggcaaagattccacacacggacggacattttcacccctctcccctcatgggtggattcggacttaaacaccctcctccacagattctcatcaagaacaccccggtacctgcgaatccttcgaccaccttcagtgcggcaaagtttgcttccttcatcacacagtactccacgggacaggtcagcgtggagatcgagtgggagctgcagaaggaaaacagcaaacgctggaatcccgaaattcagtacacttccaactacaacaagtctgttaatgtggactttactgtggacactaatggcgtgtattcagagcctcgccccattggcaccagatacctgactcgtaatctgtaa

SEQ ID NO: 377 - protein, 735 aa, Artificial Sequence
  Description of Artificial Sequence: Synthetic polypeptide
MAADGYLPDWLEDNLSEGIREWWALKPGAPKPKANQQKQDDGRGLVLPGYKYLGPFNGLDKGEPVNAADAAALEHDKAYDQQLQAGDNPYLRYNHADAEFQERLQEDTSFGGNLGRAVFQAKKRLLEPLGLVEEAAKTAPGKKRPVEQSPQEPDSSAGIGKSGAQPAKKRLNFGQTGDSESVPDPQPLGEPPAAPTSLGSNTMASGGGAPMADNNEGADGVGNASGNWHCDSTWLGDRVITTSTRTWALPTYSNHLYKQISSQSGASNDNDYFGYSTPWGYFDFNRFHCHFSPRDWQRLINNNWGFRPKRLNFKLFNIQVKEVTQNDGTTTIANNLTSTVQVFTDSEYQLPYVLGSAHQGCLPPFPADVFMVPQYGYLTLNNGSQAVGRSSFYCLEYFPSQMLRTGNNFTFSYTFEDVPFHSSYAHSQSLDRLMNPLIDQYLYYLSRTNTPSGTTTQSRLQFSQAGASDIRDQSRNWLPGPCYRQQRVSKTSEDNNNSEYSWTGATKYHLNGRDSLVNPGPAMASHKDDEEKFFPQSGVLIFGKQGSEKTNVDIEKVMITDEEEIRTTNPVATEQYGSVSTNLQRGNRQAATADVNTQGVLPGMVWQDRDVYLQGPIWAKIPHTDGHFHPSPLMGGFGLKHPPPQILIKNTPVPANPSTTFSAAKFASFITQYSTGQVSVEIEWELQKENSKRWNPEIQYTSNYNKSVNVDFTVDTNGVYSEPRPIGTRYLTRNL

SEQ ID NO: 378 - DNA, 2208 bp, Artificial Sequence
  Description of Artificial Sequence: Synthetic polynucleotide
atggctgccgatggttatcttccagattggctcgaggacaacctctctgagggcattcgcgagtggtgggcgctgaaacctggagccccgaagcccaaagccaaccagcaaaagcaggacgacggccggggtctggtgcttcctggctacaagtacctcggacccttcaacggactcgacaagggggagcccgtcaacgcggcggacgcagcggccctcgagcacgacaaggcctacgaccagcagctgcaggcgggtgacaatccgtacctgcggtataaccacgccgacgccgagttccaggagcgtctgcaagaagatacgtcttttgggggcaacctcgggcgagcagtcttccaggccaagaagagggttctcgaaccttttggtctggttgaggaaggtgctaagacggctcctggaaagaaacgtccggtagagcagtcgccacaagagccagactcctcctcgggcattggcaagacaggccagcagcccgctaaaaagagactcaattttggtcagactggcgactcagagtcagtcccagaccctcaacctctcggagaaccaccagcagcccccacaagtttgggatctaatacaatggcttcaggcggtggcgcaccaatggcagacaataacgagggcgccgacggagtgggtaattcctcgggaaattggcattgcgattccacatggatgggcgacagagtcatcaccaccagcacccgaacctgggccctgcccacctacaacaaccacctctacaaacaaatttccagccaatcaggagcttcaaacgacaaccactactttggctacagcaccccttgggggtattttgactttaacagattccactgccacttttcaccacgtgactggcagcgactcattaacaacaactggggattccggcccaagaaactcaacttcaagctctttaacatccaggtcaaggaggtcacgcagaatgaaggcaccaagaccatcgccaataacctcaccagcaccatccaggtgtttacggactcggagtaccagctgccgtacgttctcggctctgcccaccagggctgcctgcctccgttcccggcggacgtgttcatgattccccagtacggctacctaacactcaacaacggtagtcaggccgtgggacgctcctccttctactgcctggaatactttccttcgcagatgctgagaaccggcaacaacttccagtttacttacaccttcgaggacgtgcctttccacagcagctacgcccacagccagagcttggaccggctgatgaatcctctgattgaccagtacctgtattacttgtctcggactcaaacaacaggaggcacgacaaatacgcagactctgggcttcagccaaggtgggcctaatacaatggccaatcaggcaaagaactggctgcctggaccctgttaccgccagcagcgagtatcaaagacatctgcggataacaacaacagtgaatactcgtggactggagctaccaagtaccacctcaatggcagagactctctggtgaatccgggcccggccatggcaagccacaaggacgatgaagaaaagttttttcctcagagcggggttctcatctttgggaagcaaggctcagagaaaacaaatgtggacattgaaaaggttatgattacagacgaagaggaaatcaggacaaccaatcccgtggctacggagcagtatggttctgtatctaccaacctccagagaggcaacagacaagcagctaccgcagatgtcaacacacagggcgttcttccaggcatggtctggcaggacagagatgtgtaccttcagggtcccatttgggccaaaattcctcacacagatggacactttcacccgtcccctcttatgggcggctttggactcaagaacccgcctcctcagatcctcatcaaaaacacgcctgttcctgcgaatcctccggcagagttttcagctacaaagtttgcttcattcatcacccaatactccacaggacaagtgagtgtggaaattgaatgggagctgcagaaagaaaacagcaagcgctggaatcccgaagtgcagtacacatccaattatgcaaaatctgccaacgttgattttactgtggacactaatggcgtgtattcagagcctcgccccattggcaccagatacctcacccgtaatctgtaa

SEQ ID NO: 379 - protein, 735 aa, Artificial Sequence
  Description of Artificial Sequence: Synthetic polypeptide
MAADGYLPDWLEDNLSEGIREWWALKPGAPKPKANQQKQDDGRGLVLPGYKYLGPFNGLDKGEPVNAADAAALEHDKAYDQQLQAGDNPYLRYNHADAEFQERLQEDTSFGGNLGRAVFQAKKRVLEPFGLVEEGAKTAPGKKRPVEQSPQEPDSSSGIGKTGQQPAKKRLNFGQTGDSESVPDPQPLGEPPAAPTSLGSNTMASGGGAPMADNNEGADGVGNSSGNWHCDSTWMGDRVITTSTRTWALPTYNNHLYKQISSQSGASNDNHYFGYSTPWGYFDFNRFHCHFSPRDWQRLINNNWGFRPKKLNFKLFNIQVKEVTQNEGTKTIANNLTSTIQVFTDSEYQLPYVLGSAHQGCLPPFPADVFMIPQYGYLTLNNGSQAVGRSSFYCLEYFPSQMLRTGNNFQFTYTFEDVPFHSSYAHSQSLDRLMNPLIDQYLYYLSRTQTTGGTTNTQTLGFSQGGPNTMANQAKNWLPGPCYRQQRVSKTSADNNNSEYSWTGATKYHLNGRDSLVNPGPAMASHKDDEEKFFPQSGVLIFGKQGSEKTNVDIEKVMITDEEEIRTTNPVATEQYGSVSTNLQRGNRQAATADVNTQGVLPGMVWQDRDVYLQGPIWAKIPHTDGHFHPSPLMGGFGLKNPPPQILIKNTPVPANPPAEFSATKFASFITQYSTGQVSVEIEWELQKENSKRWNPEVQYTSNYAKSANVDFTVDTNGVYSEPRPIGTRYLTRNL

SEQ ID NO: 380 - DNA, 2214 bp, Artificial Sequence; identical to SEQ ID NO: 370
  Description of Artificial Sequence: Synthetic polynucleotide

SEQ ID NO: 381 - protein, 737 aa, Artificial Sequence; identical to SEQ ID NO: 371
  Description of Artificial Sequence: Synthetic polypeptide

SEQ ID NO: 382 - DNA, 2196 bp, Adeno-associated virus
atggctgctgacggttatcttccagattggctcgaggacaacctctctgagggcattcgcgagtggtgggcgctgaaacctggagccccgcaacccaaagccaaccagcaaaagcaggacgacggccggggtctggtgcttcctggctacaagtacctcggacccttcaacggactcgacaagggggagcccgtcaacgaggcggacgccgcggccctcgagcacgacaaggcctacgaccagcagctcaaagcgggtgacaatccgtacctgcggtataatcacgccgacgccgagtttcaagagcgtctgcaagaagatacgtcctttgggggcaacctcgggcgagcagtcttccaggccaaaaagagggtactcgagcctctgggtctggttgaggaaggcgctaagacggctcctggaaagaagcggccagtagaaccggactccagctcgggcatcggcaagtcaggccagcagcccgcgaaaaagagactgaattttgggcagactggcgactcagagtcagtgcctgacccccaacctctctcagaaccacccgcaggtccctctggtctgggatctggtacaatggctgctggcggtggcgctccaatggcagacaataacgaaggcgccgacggagtgggtaatgtctcaggaaattggcattgcgattccacatggctgggcgaccgagtcatcaccaccagcactcggacctgggccctccccacctacaacaaccacctctacaagcaaatctccaacgggacctcgggaggcagcagcaacgacaacacctactttggctacagcaccccctgggggtattttgactttaacagattccactgccacttttcaccacgtgactggcagcgactcatcaacaacaactgggggttccggcccaagaagctcaacttcaagctcttcaacatccaggtcaaggaggtcacccagaatgaaggcaccaagaccatcgccaataacctcaccagcacggtgcaggtctttacggactcggagtaccagctcccgtacgtgctcggctctgcccaccagggctgcctgcctccgttcccggcggacgtgttcatgattccgcagtacgggtacctgacgctgaacaacgggagccaggccgtggggcgatcctccttctactgcctggagtactttccctcgcagatgctgagaacgggcaacaactttaccttcagctacaccttcgaggacgtgcccttccacagcagctacgcgcacagccagagcctggaccggctgatgaacccgctgattgaccagtacctgtactacctgtctcggactcagaccaacgggaccaatgccacgcagactctgttgtttgctcaggccgggcctcagaacatgtcggctcaggccaagaactggctgcctggtccttgctatcggcagcagcgcgtctctacgacagtgtcgcaaaacaacaacagcaactttacctggaccggggcgaccaagtaccacctgaacggccgagactccctggtgagccccggtgtcgccatggcaacgcacaaggacgacgaggagcgcttcttcccgagcagcggggtcctgatgtttggcaagcagggcgctggaaaggacaatgtcgagtacaccaacgtgatgctcaccagcgaggaggagatcaagaccaccaaccctgtggccacggagcagtacggcgtggtggctgacaatctgcagcagaccaactcagctcccattgtgggggcagtcaacagccagggggccttacccggtatggtctggcagaaccgggacgtgtacctgcagggtcccatctgggccaagatcccgcatacggacggcaactttcacccgtctcctctcatgggcggctttggactgaaacacccgcctccccagatcctgatcaaaaacacgccggtacctgcggatcccccggtgaactttacggacgctaagctggcgagtttcatcacgcagtacagcaccgggcaggtcagcgtggagattgagtgggagctgcagaaggagaacagcaagcgctggaatcccgagattcagtacacttccaattattataaatcagctaatgtggactttgccgtcaatgcagatggtgtatatagtgaaccccgccccattggcactcgttacctcacccgtaatctgtaa

SEQ ID NO: 383 - protein, 731 aa, Adeno-associated virus
MAADGYLPDWLEDNLSEGIREWWALKPGAPQPKANQQKQDDGRGLVLPGYKYLGPFNGLDKGEPVNEADAAALEHDKAYDQQLKAGDNPYLRYNHADAEFQERLQEDTSFGGNLGRAVFQAKKRVLEPLGLVEEGAKTAPGKKRPVEPDSSSGIGKSGQQPAKKRLNFGQTGDSESVPDPQPLSEPPAGPSGLGSGTMAAGGGAPMADNNEGADGVGNVSGNWHCDSTWLGDRVITTSTRTWALPTYNNHLYKQISNGTSGGSSNDNTYFGYSTPWGYFDFNRFHCHFSPRDWQRLINNNWGFRPKKLNFKLFNIQVKEVTQNEGTKTIANNLTSTVQVFTDSEYQLPYVLGSAHQGCLPPFPADVFMIPQYGYLTLNNGSQAVGRSSFYCLEYFPSQMLRTGNNFTFSYTFEDVPFHSSYAHSQSLDRLMNPLIDQYLYYLSRTQTNGTNATQTLLFAQAGPQNMSAQAKNWLPGPCYRQQRVSTTVSQNNNSNFTWTGATKYHLNGRDSLVSPGVAMATHKDDEERFFPSSGVLMFGKQGAGKDNVEYTNVMLTSEEEIKTTNPVATEQYGVVADNLQQTNSAPIVGAVNSQGALPGMVWQNRDVYLQGPIWAKIPHTDGNFHPSPLMGGFGLKHPPPQILIKNTPVPADPPVNFTDAKLASFITQYSTGQVSVEIEWELQKENSKRWNPEIQYTSNYYKSANVDFAVNADGVYSEPRPIGTRYLTRNL

SEQ ID NO: 384 - DNA, 2196 bp, Adeno-associated virus
atggctgctgacggttatcttccagattggctcgaggacaacctctctgagggcattcgcgagtggtgggcgctgaaacctggagccccgcaacccaaagccaaccagcaaaagcaggacgacggccggggtctggtgcttcctggctacaagtacctcggacccttcaacggactcgacaagggggagcccgtcaacgaggcggacgccgcggccctcgagcacgacaaggcctacgaccagcagctcaaagcgggtgacaatccgtacctgcggtataatcacgccgacgccgagtttcaagagcgtctgcaagaagatacgtcctttgggggcaacctcgggcgagcagtcttccaggccaaaaagagggtactcgagcctctgggtctggttgaggaaggcgctaagacggctcctggaaagaagcggccagtagaaccggactccagctcgggcatcggcaagtcaggccggcagcccgcgaaaaagagactgaattttgggcagactggcgactcagagtcagtgcctgacccccaacctctctcagaaccacccgcaggtccctctggtctgggatctggtacaatggctgcaggcggtggcgctccaatggcagacaataacgaaggcgccgacggagtgggtaatgcctcaggaaattggcattgcgattccacatggctgggcgaccgagtcatcaccaccagcactcggacctgggccctccccacctacaacaaccacctctacaagcaaatctccaacgggacctcgggaggcagcagcaacgacaacacctactttggctacagcaccccctgggggtattttgactttaacagattccactgccacttttcaccacgtgactggcagcgactcatcaacaacaactggggattccggcccaagaggctcaacttcaagctcttcaacatccaggtcaaggaggtcacccagaatgaaggcaccaagaccatcgccaataacctcaccagcacggtgcaggtctttacggactcgaagtaccagctcccgtacgtgctcggctctgcccaccagggctgcctgcctccgttcccggcggacgtgttcatgattccgcagtacgggtacctgacgctgaacaacgggagccaggccgtggggcgatcctccttctactgcctggagtactttccctcgcagatgctgagaacgggcaacaactttaccttcagctacaccttcgaggacgtgcccttccacagcagctacgcgcacagccagagcctggaccggctgatgaacccgctgattgaccagtacctgtactacctgtctcggactcagaccaacgggaccaatgccacgcagactctgttgtttgctcaggccgggcctcagaacatgtcggctcaggccaagaactggctgcctggtccttgctatcggcagcagcgcgtctctacgacagtgtcgcaaaacaacaacagcaactttacctggaccggggcgaccaagtaccacctgaacggccgagactccctggtgaaccccggtgtcgccatggcaacgcacaaggacgacgaggagcgcttcttcccgagcagcggggtcctgatgtttggcaagcagggcgctggaaaggacaatgtcgagtacaccaacgtgatgctcaccagcgaggaggagatcaagaccaccaaccctgtggccacggagcagtacggtgtggtggctgacaatctgcagcagaccaactcggctcccattgtgggggcagtcaacagccagggggccttacccggtatggtctggcagaaccgggacgtgtacctgcagggtcccatctgggccaagatcccgcatacggacggcaactttcacccgtctcctctcatgggcggctttggactgaaacacccgcctccccagatcctgatcaaaaacacgccggtacctgcggatcccccggtgaactttacggacgctaagctggcgagtttcatcacgcagtacagcaccgggcaggtcagcgtggagattgagtgggagctgcagaaggagaacagcaagcgctggaatcccgagattcagtacacttccaattattataaatcagctaatgtggactttgccgtcaatgcagatggtgtatatagtgaaccccgccccattggcactcgttacctcacccgtaatctgtaa

SEQ ID NO: 385 - protein, 731 aa, Adeno-associated virus
MAADGYLPDWLEDNLSEGIREWWALKPGAPQPKANQQKQDDGRGLVLPGYKYLGPFNGLDKGEPVNEADAAALEHDKAYDQQLKAGDNPYLRYNHADAEFQERLQEDTSFGGNLGRAVFQAKKRVLEPLGLVEEGAKTAPGKKRPVEPDSSSGIGKSGRQPAKKRLNFGQTGDSESVPDPQPLSEPPAGPSGLGSGTMAAGGGAPMADNNEGADGVGNASGNWHCDSTWLGDRVITTSTRTWALPTYNNHLYKQISNGTSGGSSNDNTYFGYSTPWGYFDFNRFHCHFSPRDWQRLINNNWGFRPKRLNFKLFNIQVKEVTQNEGTKTIANNLTSTVQVFTDSKYQLPYVLGSAHQGCLPPFPADVFMIPQYGYLTLNNGSQAVGRSSFYCLEYFPSQMLRTGNNFTFSYTFEDVPFHSSYAHSQSLDRLMNPLIDQYLYYLSRTQTNGTNATQTLLFAQAGPQNMSAQAKNWLPGPCYRQQRVSTTVSQNNNSNFTWTGATKYHLNGRDSLVNPGVAMATHKDDEERFFPSSGVLMFGKQGAGKDNVEYTNVMLTSEEEIKTTNPVATEQYGVVADNLQQTNSAPIVGAVNSQGALPGMVWQNRDVYLQGPIWAKIPHTDGNFHPSPLMGGFGLKHPPPQILIKNTPVPADPPVNFTDAKLASFITQYSTGQVSVEIEWELQKENSKRWNPEIQYTSNYYKSANVDFAVNADGVYSEPRPIGTRYLTRNL

SEQ ID NO: 386 - DNA, 2196 bp, Adeno-associated virus
atggctgctgacggttatcttccagattggctcgaggacaacctctctgagggcattcgcgagtggtgggcgctgaaacctggagccccgcaacccaaagccaaccagcaaaagcaggacgacggccggggtctggtgcttcctggctacaagtacctcggacccttcaacggactcgacaagggggagcccgtcaacgaggcggacgccgcggccctcgagcacgacaaggcctacgaccagcagctcaaagcgggtgacaatccgtacctgcggtataatcacgccgacgccgagtttcaagagcgtctgcaagaagatacgtcctttgggggcaacctcgggcgagcagtcttccaggccaaaaagagggtactcgagcctctgggtctggttgaggaaggcgctaagacggctcctggaaagaagcggccagtagaaccggactccagctcgggcatcggcaagtcaggccagcagcccgcgaaaaagagactgaattttgggccgactggcgactcagagtcagtgcctgacccccaacctctctcagaaccacctgcaggtccctctggtctgggatctggtacaatggctgcaggcggtggcgctccaatggcagacaataacgaaggcgccgacggagtgggtaatgtctcaggaaattggcattgcgattccacatggctgggcgaccgagtcatcaccaccagcactcggacctgggccctccccacctacaacaaccacctctacaagcaaatctccaacgggacctcgggaggcagcagcaacgacaacacctactttggctacagcaccccctgggggtattttgactttaacagattccactgccacttttcaccacgcgactggcagcgactcatcaacaacaactggggattccggcccaagaagctcaacttcaagctcttcaacatccaggtcaaggaggtcacccagaatgaaggcaccaagaccaccgccaataacctcaccagcacggtgcaggtctttacggactcggagtaccagctcccgtacgtgctcggctctgcccaccagggctgcctgcctccgttcccggcggacgtgttcatgattccgcagtacgggtacctgacgctgaacaacgggagccaggccgtggggcgatcctccttctactgcctggagtactttccctcgcagatgctgagaacgggcaacaactttaccttcagctacaccttcgaggacgtgcccttccacagcagctacgcgcacagccagagcctggaccggctgatgaacccgctgattgaccagtacctgtactacctgtctcggactcagaccaacgggaccaatgccacgcagactctgttgtttgctcaggccgggcctcagaacatgtcggctcaggccaagaactggctgcctggtccttgctatcggcagcagcgcgtctctacggcagtgtcgcaaaacaacaacagcaactttacctggaccggggcgaccaagtaccacctgaacggccgagactccctggtgaaccccggtgtcgccatggcaacgcacaaggacgacgaggagcgcttcttcccgagcagcggggtcctgatgtttggcaagcagggcgctggaaaggacaatgtcgagtacaccaacgtgatgctcaccagcgaggaggagatcaagaccaccaaccctgtggccacggagcagtacggtgtggtggctgacaatctgcagcagaccaactcggctcccattgtgggggcagtcaacagccagggggccttacccggtatggtctggcagaaccgggacgtgtacctgcagggtcccatctgggccaagatcccgcatacggacggcaactttcacccgtctcctctcatgggcggctttggactgaaacacccgcctccccagatcctgatcaaaaacacgccggtacctgcggatcccccggtgaactttacggacgctaagctggcgagtttcatcacgcagtacagcaccgggcaggtcagcgtggagattgagtgggagctgcagaaggagaacagcaagcgctggaatcccgagattcagtacacttccaattattataaatcagctaatgtggactttgccgtcaatgcagatggtgtatatagcgaaccccgccccattggcactcgttacctcacccgtaatctgtaa

SEQ ID NO: 387 - protein, 731 aa, Adeno-associated virus
MAADGYLPDWLEDNLSEGIREWWALKPGAPQPKANQQKQDDGRGLVLPGYKYLGPFNGLDKGEPVNEADAAALEHDKAYDQQLKAGDNPYLRYNHADAEFQERLQEDTSFGGNLGRAVFQAKKRVLEPLGLVEEGAKTAPGKKRPVEPDSSSGIGKSGQQPAKKRLNFGPTGDSESVPDPQPLSEPPAGPSGLGSGTMAAGGGAPMADNNEGADGVGNVSGNWHCDSTWLGDRVITTSTRTWALPTYNNHLYKQISNGTSGGSSNDNTYFGYSTPWGYFDFNRFHCHFSPRDWQRLINNNWGFRPKKLNFKLFNIQVKEVTQNEGTKTTANNLTSTVQVFTDSEYQLPYVLGSAHQGCLPPFPADVFMIPQYGYLTLNNGSQAVGRSSFYCLEYFPSQMLRTGNNFTFSYTFEDVPFHSSYAHSQSLDRLMNPLIDQYLYYLSRTQTNGTNATQTLLFAQAGPQNMSAQAKNWLPGPCYRQQRVSTAVSQNNNSNFTWTGATKYHLNGRDSLVNPGVAMATHKDDEERFFPSSGVLMFGKQGAGKDNVEYTNVMLTSEEEIKTTNPVATEQYGVVADNLQQTNSAPIVGAVNSQGALPGMVWQNRDVYLQGPIWAKIPHTDGNFHPSPLMGGFGLKHPPPQILIKNTPVPADPPVNFTDAKLASFITQYSTGQVSVEIEWELQKENSKRWNPEIQYTSNYYKSANVDFAVNADGVYSEPRPIGTRYLTRNL

SEQ ID NO: 388 - DNA, 4404 bp, Adeno-associated virus
atggctgccgatggttatcttccagattggctcgagggcaacctctctgagggcattcgcgagtggtgggacttgaaacctggagccccgaaacccaaagccaaccagcaaaagcaggacgacggccggggtctggtgcttcctggctacaggtacctcggacccttcaacggactcgacaagggagagccggtcaacgaggcagacgccgcggccctcgagcacgacaaggcctacgacaagcagctcgagcagggggacaacccgtacctcaagtacaaccacgccgacgccgagtttcaggagcgtcttcaagaagatacgtcttttgggggcaacctcgggcgagcagtcttccaggccaagaagcgggttctcgaacctctcggtctggttgaggaaggcgctaagacggctcctggaaagaagagacccatagaatcccccgactcctccacgggcatcggcaagaacggccagccgcccgctaaaaagaagctcaactttgggcagactggcgactcagagtcagtgcccgacccccaacctctcggagaacctcccgccgcgccctcaggtctgggatctggtacaatggctgcaggcggtggcgcaccaatggcagacaataacgaaggcgccgacggagtgggtaatgcctccggaaattggcattgcgattccacatggctgggcgacagagtcatcaccaccagcacccgcacctgggccctgcccacctacaacaaccacctctacaagcagatatcaagtcagagcggggctaccaacgacaaccacttcttcggctacagcaccccctggggctattttgacttcaacagattccactgccacttctcaccacgtgactggcagcgactcatcaacaacaactggggattccggcccagaaagctgcggttcaagttgttcaacatccaggtcaaggaggtcacgacgaacgacggcgttacgaccatcgctaataaccttaccagcacgattcaggtcttctcggactcggagtaccaactgccgtacgtcctcggctctgcgcaccagggctgcctccctccgttccctgcggacgtgttcatgattcctcagtacggatatctgactctaaacaacggcagtcagtctgtgggacgttcctccttctactgcctggagtactttccttctcagatgctgagaacgggcgataactttgaattcagctacacctttgaggaagtgcctttccacagcagctatgcgcacagccagagcctggaccggctgatgaatcccctcatcgaccagtacctgtactacctggcccggacccagagcactacggggtccacaagggagctgcagttccatcaggctgggcccaacaccatggccgagcaatcaaagaactggctgcccggaccctgttatcggcagcagagactgtcaaaaaacatagacagcaacaacaacagtaactttgcctggaccggggccactaaataccatctgaatggtagaaattcattaaccaacccgggcgtagccatggccaccaacaaggacgacgaggaccagttctttcccatcaacggagtgctggtttttggcaaaacgggggctgccaacaagacaacgctggaaaacgtgctaatgaccagcgaggaggagatcaaaaccaccaatcccgtggctacagaagaatacggtgtggtctccagcaacctgcaatcgtctacggccggaccccagacacagactgtcaacagccagggggctctgcccggcatggtctggcagaaccgggacgtgtacctgcagggtcccatctgggccaaaattcctcacacggacggcaactttcacccgtctcccctgatgggcggatttggactcaaacacccgcctcctcaaattctcatcaaaaacaccccggtacctgctaatcctccagaggtgtttactcctgccaagtttgcctcatttatcacgcagtacagcaccggccaggtcagcgtggagatcgagtgggaactgcagaaagaaaacagcaaacgctggaatccagagattcagtacacctcaaattatgccaagtctaataatgtggaatttgctgtcaacaacgaaggggtttatactgagcctcgccccattggcacccgttacctcacccgtaacctgtaaatggctgccgatggttatcttccagattggctcgaggacaacctctctgagggcattcgcgagtggtgggacttgaaacctggagccccgaaacccaaagccaaccagcaaaagcaggacgacggccggggtctggtgcttcctggctacaagtacctcggacccttcaacggactcgacaagggggagcccgtcaacgcggcggacgcagcggccctcgagcacgacaaggcctacgaccagcagctcaaagcgggtgacaatccgtacctgcggtataaccacgccgacgccgagtttcaggagcgtctgcaagaagatacgtcttttgggggcaacctcgggcgagcagtcttccaggccaagaagcgggttctcgaacctctcggtctggttgaggaaggcgctaagacggctcctggaaagaagagaccggtagagccatcaccccagcgttctccagactcctctacgggcatcggcaagaaaggccagcagcccgcgaaaaagagactcaactttgggcagactggcgactcagagtcagtgcccgaccctcaaccaatcggagaaccccccgcaggcccctctggtctgggatctggtacaatggctgcaggcggtggcgctccaatggcagacaataacgaaggcgccgacggagtgggtagttcctcaggaaattggcattgcgattccacatggctgggcgacagagtcatcaccaccagcacccgaacctgggccctccccacctacaacaaccacctctacaagcaaatctccaacgggacttcgggaggaagcaccaacgacaacacctacttcggctacagcaccccctgggggtattttgactttaacagattccactgccacttctcaccacgtgactggcagcgactcatcaacaacaactggggattccggcccaagagactcaacttcaagctcttcaacatccaggtcaaggaggtcacgcagaatgaaggcaccaagaccatcgccaataaccttaccagcacgattcaggtctttacggactcggaataccagctcccgtacgtcctcggctctgcgcaccagggctgcctgcctccgttcccggcggacgtcttcatgattcctcagtacgggtacctgactctgaacaatggcagtcaggccgtgggccgttcctccttctactgcctggagtactttccttctcaaatgctgagaacgggcaacaactttgagttcagctaccagtttgaggacgtgccttttcacagcagctacgcgcacagccaaagcctggaccggctgatgaaccccctcatcgaccagtacctgtactacctgtctcggactcagtccacgggaggtaccgcaggaactcagcagttgctattttctcaggccgggcctaataacatgtcggctcaggccaaaaactggctacccgggccctgctaccggcagcaacgcgtctccacgacactgtcgcaaaataacaacagcaactttgcctggaccggtgccaccaagtatcatctgaatggcagagactctctggtaaatcccggtgtcgctatggcaacccacaaggacgacgaagagcgattttttccgtccagcggagtcttaatgtttgggaaacagggagctggaaaagacaacgtggactatagcagcgttatgctaaccagtgaggaagaaattaaaaccaccaacccagtggccacagaacagtacggcgtggtggccgataacctgcaacagcaaaacgccgctcctattgtaggggccgtcaacagtcaaggagccttacctggcatggtctggcagaaccgggacgtgtacctgcagggtcctatctgggccaagattcctcacacggacggaaactttcatccctcgccgctgatgggaggctttggactgaaacacccgcctcctcagatcctgattaagaatacacctgttcccgcggatcctccaactaccttcagtcaagctaagctggcgtcgttcatcacgcagtacagcaccggacaggtcagcgtggaaattgaatgggagctgcagaaagaaaacagcaaacgctggaacccagagattcaatacacttccaactactacaaatctacaaatgtggactttgctgttaacacagatggcacttattctgagcctcgccccatcggcacccgttacctcacccgtaatctgtaa

SEQ ID NO: 389 - protein, 738 aa, Adeno-associated virus; identical to SEQ ID NO: 7

SEQ ID NO: 390 - DNA, 3129 bp, Adeno-associated virus
gaattcgccctttctacggctgcgtcaactggaccaatgagaactttcccttcaacgattgcgtcgacaagatggtgatctggtgggaggagggcaagatgacggccaaggtcgtggagtccgccaaggccattctcggcggcagcaaagtgcgcgtggaccaaaagtgcaagtcgtccgcccagatcgaccccacccccgtgatcgtcacctccaacaccaacatgtgcgccgtgattgacgggaacagcaccaccttcgagcaccagcagccgttgcaggaccggatgttcaagtttgaactcacccgccgtctggagcacgactttggcaaggtgacaaagcaggaagtcagagagttcttccgctgggcgcaggatcacgtgaccgaggtggcgcacgagttctacgtcagaaagggtggagccaacaagagacccgcccccgatgacgcggataaaagcgagcccaagcgggcctgcccctcagtcgcggatccatcgacgtcagacgcggaaggagctccggtggactttgccgacaggtaccaaaacaaatgttctcgtcacgcgggcatgcttcagatgctgtttccctgcaaaacatgcgagagaatgaatcagaatttcaacatttgcttcacgcacgggaccagagactgttcagaatgtttccccggcgtgtcagaatctcaaccggtcgtcagaaaaaagacgtatcggaaactctgtgcgattcatcatctgctgggggcgggcacccgagattgcttgctcggcctgcgatctggtcaacgtggacctagatgactgtgtttctgagcaataaatgacttaaaccaggtatggctgccgatggttatcttccagattggctcgaggacaacctctctgagggcattcgcgagtggtgggacttgaaacctggagccccgaaacccaaagccaaccagcaaaagcaggacgacggccggggtctggtgcttcctggctacaagtacctcggacccttcaacggactcgacaagggggagcccgtcaacgcggcggacgcagcggccctcgagcacgacaaggcctacgaccagcagctcaaagcgggtgacaatccgtacctgcggtataaccacgccgacgccgagtttcaggagcgtctgcaagaagatacgtcttttgggggcaacctcgggcgagcagtcttccaggccaagaagcgggttctcgaacctctcggtctggttgaggaaggcgctaagacggctcctggaaagaagagaccggtagagccatcaccccagcgttctccagactcctctacgggcatcggcaagaaaggccagcagcccgcgaaaaagagactcaactttgggcagactggcgactcagagtcagtgcccgaccctcaaccaatcggagaaccccccgcaggcccctctggtctgggatctggtacaatggctgcaggcggtggcgctccaatggcagacaataacgaaggcgccgacggagtgggtagttcctcaggaaattggcattgcgattccacatggctgggcgacagagtcatcaccaccagcacccgaacctgggccctccccacctacaacaaccacctctacaagcaaatctccaacgggacttcgggaggaagcaccaacgacaacacctacttcggctacagcaccccctgggggtattttgactttaacagattccactgccacttctcaccacgtgactggcagcgactcatcaacaacaactggggattccggcccaagagactcaacttcaagctcttcaacatccaggtcaaggaggtcacgcagaatgaaggcaccaagaccatcgccaataaccttaccagcacgattcaggtctttacggactcggaataccagctcccgtacgtcctcggctctgcgcaccagggctgcctgcctccgttcccggcggacgtcttcatgattcctcagtacgggtacctgactctgaacaatggcagtcaggccgtgggccgttcctccttctactgcctggagtactttccttctcaaatgctgagaacgggcaacaactttgagttcagctaccagtttgaggacgtgccttttcacagcagctacgcgcacagccaaagcctggaccggctgatgaaccccctcatcgaccagtacctgtactacctgtctcggactcagtccacgggaggtaccgcaggaactcagcagttgctattttctcaggccgggcctaataacatgtcggctcaggccaaaaactggctacccgggccctgctaccggcagcaacgcgtctccacgacactgtcgcaaaataacaacagcaactttgcctggaccggtgccaccaagtatcatctgaatggcagagactctctggtaaatcccggtgtcgctatggcaacccacaaggacgacgaagagcgattttttccgtccagcggagtcttaatgtttgggaaacagggagctggaaaagacaacgtggactatagcagcgttatgctaaccagtgaggaagaaattaaaaccaccaacccagtggccacagaacagtacggcgtggtggccgataacctgcaacagcaaaacgccgctcctattgtaggggccgtcaacagtcaaggagccttacctggcatggtctggcagaaccgggacgtgtacctgcagggtcctatctgggccaagattcctcacacggacggaaactttcatccctcgccgctgatgggaggctttggactgaaacacccgcctcctcagatcctgattaagaatacacctgttcccgcggatcctccaactaccttcagtcaagctaagctggcgtcgttcatcacgcagtacagcaccggacaggtcagcgtggaaattgaatgggagctgcagaaagaaaacagcaaacgctggaacccagagattcaatacacttccaactactacaaatctacaaatgtggactttgctgttaacacagatggcacttattctgagcctcgccccatcggcacccgttacctcacccgtaatctgtaattgcttgttaatcaataaaccggttgattcgtttcagttgaactttggtctctgcgaagggcgaattc

SEQ ID NO: 391 - protein, 738 aa, Artificial Sequence; identical to SEQ ID NO: 7
  Description of Artificial Sequence: Synthetic polypeptide

SEQ ID NO: 392 - protein, 733 aa, Artificial Sequence
  Description of Artificial Sequence: Synthetic polypeptide
MAADGYLPDWLEDNLSEGIREWWDLRPGAPKPKANQQKQDDGRGLVLPGYKYLGPFNGLDKGEPVNEADAAALEHDKAYDKQLEQGDNPYLKYNHADAEFQERLQEDTSFGGNLGRAVFQAKKRVLEPLGLVEEGAKTAPGKKRPIESPDSSTGIGKKGQQPAKKRLNFGQTGDSESVPDPQPIGEPPAGPSGLGSGTMAAGGGAPMADNNEGADGVGSSSGNWHCDSTWLGDRVITTSTRTWALPTYNNHLYKQISNGTSGGSTNDNTYFGYSTPWGYFDFNRFHCHFSPRDWQRLINNNWGFRPKRLNFKLFNIQVKEVTQNEGTKTIANNLTSTIQVFTDSEYQLPYVLGSAHQGCLPPFPADVFMIPQYGYLTLNNGSQAVGRSSFYCLEYFPSQMLRTGNNFEFSYQFEDVPFHSSYAHSQSLDRLMNPLIDQYLYYLSRTQSTGGTAGTQQLLFSQAGPNNMSAQAKNWLPGPCYRQQRVSTTVSQNNNSNFAWTGATKYHLNGRDSLVNPGVAMATHKGDEERFFPSSGVLMFGKQGAGKDNVDYSSVMLTSEEEIKTTNPVATEQYGVVADNLQQQNAAPIVGAVNSQGALPGMVWQNRDVYLQGPIWAKIPHTDGNFHPSPLMGGFGLKHPPPQILIKNTPVPADPPTTFSQAKLASFITQYSTGQVSVEIEWELQKENSKRWNPEIQYTSNYYKSTNVDFAVNTEGTYSEPRPIGTRYLTRNL

SEQ ID NO: 393 - DNA, 2501 bp, Adeno-associated virus
gaattcgcccttggctgcgtcaactggaccaatgagaactttcccttcaacgattgcgtcgacaagatggtgatctggtgggaggagggcaagatgacggccaaggtcgtggagtccgccaaggccattcatcatctgctggggcgggctcccgagattgcttgctcggcctgcgatctggtcaacgtggacctggatgactgtgtttctgagcaataaatgacttaaaccaggtatggctgccgatggttatcttccagattggctcgaggacaacctctctgagggcattcgcgagtggtgggacttgagacctggagccccgaaacccaaagccaaccagcaaaagcaggacgacggccggggtctggtgcttcctggctacaagtacctcggacccttcaacggactcgacaagggagagccggtcaacgaggcagacgccgcggccctcgagcacgacaaggcctacgacaagcagctcgagcagggggacaacccgtacctcaagtacaaccacgccgacgccgagtttcaggagcgtcttcaagaagatacgtcttttgggggcaacctcgggcgagcagtcttccaggccaagaagcgggttctcgaacctctcggtctggttgaggaaggcgctaagacggctcctggaaagaagagacccatagaatcccccgactcctccacgggcatcggcaagaaaggccagcagcccgctaaaaagagactcaactttgggcagactggcgactcagagtcagtgcccgaccctcaaccaatcggagaaccccccgcaggcccctctggtctgggatctggcacaatggctgcaggcggtggcgctccaatggcagacaataacgaaggcgccgacggagtgggtagttcctcaggaaattggcattgcgattccacatggctgggcgacagagtcatcaccaccagcacccgaacctgggccctccccacctacaacaaccacctctacaagcaaatctccaacgggacatcgggaggaagcaccaacgacaacacctacttcggctacagcaccccctgggggtattttgactttaacagattccactgccacttctcaccacgtgactggcagcgactcatcaacaacaactggggattccggcccaagagactcaacttcaagctcttcaacatccaggtcaaggaggtcacgcagaatgaaggcaccaagaccatcgccaataaccttaccagcacgattcaggtctttacggactcggaataccagctcccgtacgtcctcggctctgcgcaccagggctgcctgcctccgttcccggcggacgtcttcatgattcctcagtacgggtacctgactctgaacaacggcagtcaggccgtgggccgttcctccttctactgcctggagtactttccttctcaaatgctgagaacgggcaacaactttgagttcagctaccagtttgaggacgtgccttttcacagcagctatgcgcacagccaaagcctggaccggctgatgaaccccctcatcgaccagtacctgtactacctgtctcggactcagtccacgggaggtaccgcaggaactcagcagttgctattttctcaggccgggcctaataacatgtcggctcaggccaaaaactggctacccgggccctgctaccggcagcaacgcgtctccacgacagtgtcgcaaaataacaacagcaactttgcttggaccggtgccaccaagtatcatctgaatggcagagactctctggtaaatcccggtgtcgctatggcaacgcacaagggcgacgaagagcgattttttccatccagcggagtcttgatgtttgggaaacagggagctggaaaagacaacgtagactatagcagcgttatgctaaccagtgaggaagaaatcaaaaccaccaacccagtggccacagaacagtacggcgtggtggccgataacctgcaacagcaaaacgccgctcctattgtaggggccgtcaacagtcaaggagccttacctggcatggtctggcagaaccgggacgtgtacctgcagggtcctatctgggccaagattcctcacacggacggcaactttcatccttcgccgctgatgggaggctttggactgaaacacccgcctcctcagatcctgattaagaatacacctgttcccgcggatcctccaactaccttcagtcaagccaagctggcgtcgttcatcacgcagtacagcaccggacaggtcagcgtggaaattgaatgggagctgcagaaagagaacagcaagcgctggaacccagagattcagtatacttccaactactacaaatctacaaatgtggactttgctgtcaatactgagggtacttattcagagcctcgccccattggcacccgttacctcacccgtaacctgtaattgcctgttaatcaataaaccggttgattcgtttcagttgaactttggtctcaagggcgaattc

SEQ ID NO: 394 - DNA, 2187 bp, Adeno-associated virus
atggctgccgatggttatcttccagattggctcgaggacaacctctctgagggcattcgcgagtggtgggacttgaaacctggagccccgaaacccaaagccaaccagcaaaagcaggacgacggccggggtctggtgcttcctggctacaagtacctcggacccttcaacggactcgacaagggagagccggtcaacgaggcagacgccgcggccctcgagcacgacaaggcctacgacaagcagctcgagcagggggacaacccgtacctcaagtacaaccacgccgacgccgagtttcaggagcgtcttcaagaagatacgtcttttgggggcaacctcgggcgagcagtcttccaggccaagaagcgggttctcgaacctctcggtctggttgaggaaggcgctaagacggctcctggaaagaagagacccatagaatcccccgactcctccacgggcatcggcaagaaaggccagcagcccgctaaaaagaagctcaactttgggcagactggcgactcagagtcagtgcccgacccccaacctctcggagaacctcccgccgcgccctcaggtctgggatctggtacaatggctgcaggcggtggcgcaccaatggcagacaataacgaaggcgccgacggagtgggtaatgcctccggaaattggcattgcgattccacatggctgggcgacagagtcatcaccaccagcacccgcacctgggccctgcccacctacaacaaccacctctacaagcagatatcaagtcagagcggggctaccaacgacaaccacttcttcggctacagcaccccctggggctattttgacttcaacagattccactgccacttctcaccacgtgactggcagcgactcatcaacaacaactggggattccggcccagaaagctgcggttcaagttgttcaacatccaggtcaaggaggtcacgacgaacgacggcgttacgaccatcgctaataaccttaccagcacgattcaggtcttctcggactcggagtaccaactgccgtacgtcctcggctctgcgcaccagggctgcctccctccgttccctgcggacgtgttcatgattcctcagtacggatatctgactctaaacaacggcagtcagtctgtgggacgttcctccttctactgcctggagtactttccttctcagatgctgagaacgggcaataactttgaattcagctacacctttgaggaagtgcctttccacagcagctatgcgcacagccagagcctggaccggctgatgaatcccctcatcgaccagtacctgtactacctggcccggacccagagcactacggggtccacaagggagctgcagttccatcaggctgggcccaacaccatggccgagcaatcaaagaactggctgcccggaccctgttatcggcagcagagactgtcaaaaaacatagacagcaacaacaacagtaactttgcctggaccggggccactaaataccatctgaatggtagaaattcattaaccaacccgggcgtagccatggccaccaacaaggacgacgaggaccagttctttcccatcaacggagtgctggtttttggcgaaacgggggctgccaacaagacaacgctggaaaacgtgctaatgaccagcgaggaggagatcaaaaccaccaatcccgtggctacagaagaatacggtgtggtctccagcaacctgcaatcgtctacggccggaccccagacacagactgtcaacagccagggggctctgcccggcatggtctggcagaaccgggacgtgtacctgcagggtcccatctgggccaaaattcctcacacggacggcaactttcacccgtctcccctgatgggcggatttggactcaaacacccgcctcctcaaattctcatcaaaaacaccccggtacctgctaatcctccagaggtgtttactcctgccaagtttgcctcatttatcacgcagtacagcaccggccaggtcagcgtggagatcgagtgggaactgcagaaagaaaacagcaaacgctggaatccagagattcagtacacctcaaattatgccaagtctaataatgtggaatttgctgtcaacaacgaaggggtttatactgagcctcgccccattggcacccgttacctcacccgtaacctgtaa

SEQ ID NO: 395 - protein, 728 aa, Adeno-associated virus; identical to SEQ ID NO: 63

SEQ ID NO: 396 - protein, 728 aa, Adeno-associated virus; identical to SEQ ID NO: 155

SEQ ID NO: 397 - protein, 728 aa, Adeno-associated virus; identical to SEQ ID NO: 155

SEQ ID NO: 398 - protein, 733 aa, Artificial Sequence
  Description of Artificial Sequence: Synthetic polypeptide
MAADGHLPDWLEDNLSEGIREWWDLKPGAPKPKANQQKQDDGRGLVLPGYKYLGPFNGLDKGEPVNAADAAALEHDKAYDQQLKAGDNPYLRYNHADAEFQERLQEDTSFGGNLGRAVFQAKKRVLEPLGLVEEGAKTAPGKKRPIESPDSSTGIGKKGQQPAKKKLNFGQTGDSESVPDPQPIGEPPAGPSGLGSGTMAAGGGAPMADNNEGADGVGSSSGNWHCDSTWLGDRVITTSTRTWALPTYNNHLYKQISNGTSGGSTNDNTYFGYSTPWGYFDFNRFHCHFSPRDWQRLINNSWGFRPKRLNFKLFNIQVKEVTQNEGTKTIANNLTSTIQVFTDSEYQLPYVLGSAHQGCLPPFPADVFMIPQYGYLTLNNGSQAVGRSSFYCLEYFPSQMLRTGNNFEFSYQFEDVPFHSSYAHSQSLDRLMNPLIDQYLYYLSRTQSTGGTAGTQQLLFSQAGPNNMSAQAKNWLPGPCYRQQRVSTTLSQNNNSNFAWTGATKYHLNGRDSLVNPGVAMATHKDDEERFFPSSGVLMFGKQGAGKDNVDYSSVMLTSEEEIKTTNPVATEQYGVVADNLQQQNAAPIVGAVNSQGALPGMVWQNRDVYLQGPIWAKIPHTDGNFHPSPLMGGFGLKHPPPQILIKNTPVPADPPTTFSQAKLASFITQYSTGQVSVEIEWELQKENSKRWNPEIQYTSNYYKSTNVDFAVNTEGTYSEPRPIGTRYLTRNL

SEQ ID NO: 399 - DNA, 3113 bp, Adeno-associated virus
gaattcgccctttctacggctgcgtcaactggaccaatgagaactttcccttcaacgattgcgtcgacaagatggtgatctggtgggaggagggcaagatgacggccaaggtcgtggagtccgccaaggccattctcggcggcagcaaggtgcgcgtggaccaaaagtgcaagtcgtccgcccagatcgatcccacccccgtgatcgtcacttccaacaccaacatgtgcgccgtgattgacgggaacagcaccaccttcgagcaccagcagccgttacaagaccggatgttcaaatttgaactcacccgccgtctggagcatgactttggcaaggtgacaaagcaggaagtcaaagagttcttccgctgggcgcaggatcacgtgaccgaggtggcgcatgagttctacgtcagaaagggtggagccaacaagagacccgcccccgatgacgcggataaaagcgagcccaagcgggcctgcccctcagtcgcggatccatcgacgtcagacgcggaaggagctccggtggactttgccgacaggtaccaaaacaaatgttctcgtcacgcgggcatgcttcagatgctgcttccctgcaagacatgcgagagaatgaatcagaatttcagcatttgcttcacgcacgggaccagagactgttcagaatgtttccccggcgtgtcagaatctcaaccggtcgtcagaaagaggacgtatcggaaactctgtgccattcatcatctgctggggcgggctcccgagattgcttgctcggcctgcgatctggtcaacgtggacctggatgactgtgtttctgagcaataaatgacttaaaccaggtatggctgccgatggtcatcttccagattggctcgaggacaacctctctgagggcattcgcgagtggtgggacttgaaacctggagccccgaaacccaaagccaaccagcaaaagcaggacgacggccggggtctggtgcttcctggctacaagtacctcggacccttcaacggactcgacaagggggagcccgtcaacgcggcggacgcagcggccctcgagcacgacaaggcctacgaccagcagctcaaagcgggtgacaatccgtacctgcggtataaccacgccgacgccgagtttcaggagcgtcttcaagaagatacgtcttttgggggcaacctcgggcgagcagtcttccaggccaagaagcgggttctcgaacctctcggtctggttgaggaaggcgctaagacggctcctggaaagaagagacccatagaatcccccgactcctccacgggcatcggcaagaaaggccagcagcccgctaaaaagaagctcaactttgggcagactggcgactcagagtcagtgcccgaccctcaaccaatcggagaaccccccgcaggcccctctggtctgggatctggtacaatggctgcaggcggtggcgctccaatggcagacaataacgaaggcgccgacggagtgggtagttcctcaggaaattggcattgcgattccacatagctgggcgacagagtcatcaccaccagcacccgaacctgggccctccccacctacaacaaccacctctacaagcaaatctccaacgggacatcgggaggaagcaccaacgacaacacctacttcggctacagcaccccctgggggtattttgactttaacagattccactgccacttctcaccacgtgactggcagcgactcatcaacaacagctggggattccggcccaagagactcaacttcaagctcttcaacatccaggtcaaggaggtcacgcagaatgaaggcaccaagaccatcgccaataaccttaccagcacgattcaggtctttacggactcggaataccagctcccgtacgtcctcggctctgcgcaccagggctgcctgcctccgttcccggcggacgtcttcatgattcctcagtacgggtacctgactctgaacaacggcagtcaggccgtgggccgttcctccttctactgcctggagtactttccttctcaaatgctgagaacgggcaacaactttgagttcagctaccagtttgaggacgtgccttttcacagcagctacgcgcacagccaaagcctggaccggctgatgaaccccctcatcgaccagtacctgtactacctgtctcggactcagtccacgggaggtaccgcaggaactcagcagttgctattttctcaggccgggcctaataacatgtcggctcaggccaaaaactggctacccgggccctgctaccggcagcaacgcgtctccacgacactgtcgcaaaataacaacagcaactttgcttggaccggtgccaccaagtatcatctgaatggcagagactctctggtaaatcccggtgtcgctatggcaacgcacaaggacgacgaagagcgattttttccatccagcggagtcttgatgtttgggaaacagggagctggaaaagacaacgtggactatagcagcgttatgctaaccagtgaggaagaaatcaaaaccaccaacccagtggccacagaacagtacggcgtggtggccgataacctgcaacagcaaaacgccgctcctattgtaggggccgtcaacagtcaaggagccttacctggcatggtctggcagaaccgggacgtgtacctgcagggtcctatctgggccaagattcctcacacggacggcaactttcatccttcgccgctgatgggaggctttggactgaaacacccgcctcctcagatcctgattaagaatacacctgttcccgcggatcctccaactaccttcagtcaagccaagctggcgtcgttcatcacgcagtacagcaccggacaggtcagcgtggaaattgaatgggagctgcagaaagagaacagcaagcgctggaacccagagattcagtatacttccaactactacaaatctacaaatgtggactttgctgtcaatactgagggtacttattcagagcctcgccccattggcacccgttacctcacccgtaacctgtaattgcctgttaatcaataaaccggttaattcgtttcagttgaactttggtctctgcgaagggcgaattc

SEQ ID NO: 400 - protein, 731 aa, Artificial Sequence
  Description of Artificial Sequence: Synthetic polypeptide
MAADGYLPDWLEDNLSEGIREWWDLKPGAPKPKANQQKQDDGRGLVLPGYKYLGPFNGLDKGEPVNEADAAALEHDKAYDKQLEQGDNPYLKYNHADAEFQERLQEDTSFGGNLGRAVFRAKKRVLEPLGLVEEGAKTAPGKKRPIESPDSSTGIGKKGQQPAKKKLNFGQTGDSESVPDPQPLGEPPAAPSGLGSGTMAAGGGAPMADNNEGADGVGNASGNWHCDSTWLGDRVITTSTRTWALPTYNNHLYKQISSQSGATNDNHFFGYSTPWGYFDFNRFHCHFSPRDWQRLINNNRGFRPRKLRFKLFNIQVKEVTTNDGVTTIANNLTSTIQVFSDSEYQLPYVLGSAHQGCLPPFPADVFMIPQYGYLTLNNGSQSVGRSSFYCLEYFPSQMLRTGNNFEFSYQFEDVPFHSSYAHSQSLDRLMNPLIDQYLYYLSRTQSTGGTAGTQQLLFSQAGPNNMSAQAKNWLPGPCYRQQRVSTTLSQNNNSNFAWTGATKYHLNGRDSLVNPGVAMATHKDDEERFFPSSGVLMFGKQGAGKDNVDYSSVMLTSEEEIKTTNPVATEQYGVVADNLQQQNAAPIVGAVNSQGALPGMAWQNRDVYLQGPIWAKIPHTDGNFHPSPLMGGFGLKHPPPQILIKNTPVPADPPTTFSQAKLASFITQYSTGQVSVEIEWELQKENSKRWNPEIQYTSNYYKSTNVDFAVNTEGTYSEPRPIGTRYLTRNL

SEQ ID NO: 401 - DNA, 3106 bp, Adeno-associated virus
gaattcgcccttctacggctgcgtcaactggaccaatgagaactttcccttcaacgattgcgtcgacaagatggtgatctggtgggaggagggcaagatgacggccaaggtcgtggagtccgccaaggccattctcggcggcagcaaggtgcgcgtggaccaaaagtgcaagtcgtccgcccagatcgaccccacccccgtgatcgtcacctccaacaccaacatgtgcgccgtgattgacgggaacagcaccaccttcgagcaccagcagccgttgcaggaccggatgttcaaatttgaactcacccgccgtctggagcatgactttggcaaggcgacaaagcaggaagtcaaagagttcttccgctgggcgcaggatcacgtgaccgaggtggcgcatgagttctacgtcagaaagggtggagccaacaagagacccgcccccgatgacgcggataaaagcgagcccaagcgggcccgcccctcagtcgcggatccatcgacgtcagacgcggaaggagctccggtggactttgccgacaggtaccaaaacaaatgttctcgtcacgcgggcatgcttcagatgctgtttccctgcaaaacatgcgagagaatgaatcagaatttcaacatttgcttcacgcacgggaccagagactgttcagaatgtttccccggcgtgtcagaatctcaaccggtcgtcagaaagaggacgtatcggaaactctgtgccattcatcatctgctggggcgggctcccgagattgcttgctcggcctgcgatctggtcaacgtggacctggatgactgtgtttctgagcaataaatgacttaaaccaggtatggctgccgatggttatcttccagattggctcgaggacaacctctctgagggcattcgcgagtggtgggacttgaaacctggagccccgaaacccaaagccaaccagcaaaagcaggacgacggccggggtctggtgcttcctggctacaagtacctcggacccttcaacggactcgacaagggagagccggtcaacgaggcagacgccgcggccctcgagcacgacaaggcctacgacaagcagctcgagcagggggacaacccgtacctcaagtacaaccacgccgacgccgagtttcaggagcgtcttcaagaagatacgtcttttgggggcaacctcgggcgagcagtcttccgggccaagaagcgggttctcgaacctctcggtctggttgaggaaggcgctaagacggctcctggaaagaagagacccatagaatcccccgactcctccacgggcatcggcaagaaaggccagcagcccgctaaaaagaagctcaactttgggcagactggcgactcagagtcagtgcccgacccccaacctctcggagaacctcccgccgcgccctcaggtctgggatctggtacaatggctgcaggcggtggcgcaccaatggcagacaataacgaaggcgccgacggagtgggtaatgcctccggaaattggcattgcgattccacatggctgggcgacagagtcatcaccaccagcacccgcacctgggccctgcccacctacaacaaccacctctacaagcagatatcaagtcagagcggggctaccaacgacaaccacttcttcggctacagcaccccctggggctattttgacttcaacagattccactgccacttctcaccacgtgactggcagcgactcatcaacaacaaccggggattccggcccagaaagctgcggttcaagttgttcaacatccaggtcaaggaggtcacgacgaacgacggcgttacgaccatcgctaataaccttaccagcacgattcaggtcttctcggactcggagtaccaactgccgtacgtcctcggctctgcgcaccagggctgcctccctccgttccctgcggacgtgttcatgattcctcagtacggatatctgactctaaacaacggcagtcagtctgtgggacgttcctccttctactgcctggagtactttccttctcagatgctgagaacgggcaataactttgaattcagctaccagtttgaggacgtgccctttcacagcagctacgcgcacagccaaagcctggaccggctgatgaaccccctcatcgaccagtacctgtactacctgtctcggactcagtccacgggaggtaccgcaggaactcagcagttgctattttctcaggccgggcctaataacatgtcggctcaggccaaaaactggctacccgggccctgctaccggcagcaacgcgtctccacgacactgtcgcaaaataacaacagcaactttgcttggaccggtgccaccaagtatcatctgaatggcagagactctctggtaaatcccggtgtcgctatggcaacgcacaaggacgacgaagagcgattttttccatccagcggagtcttgatgtttgggaaacagggagctggaaaagacaacgtggactatagcagcgttatgctaaccagtgaggaagaaatcaaaaccaccaacccagtggccacagaacagtacggcgtggtggccgataacctgcaacagcaaaacgccgctcctattgtaggggccgtcaacagtcaaggagccttacctggcatggcctggcagaaccgggacgtgtacctgcagggtcctatctgggccaagattcctcacacggacggcaactttcatccttcgccgctgatgggaggctttggactgaaacacccgcctcctcagatcctgattaagaatacacctgttcccgcggatcctccaactaccttcagtcaagccaagctggcgtcgttcatcacgcagtacagcaccggacaggtcagcgtggaaattgaatgggagctgcagaaagagaacagcaagcgctggaacccagagattcagtatacttccaactactacaaatctacaaatgtggactttgctgtcaatactgagggtacttattcagagcctcgccccattggcacccgttacctcacccgtaacctgtaattgcctgttaatcaataaaccggttaattcgtttcagttgaactttggtctctgcgaagggcgaattc

SEQ ID NO: 402 - protein, 738 aa, Artificial Sequence
  Description of Artificial Sequence: Synthetic polypeptide
MAADGYLPDWLEDNLSEGIREWWDLKPGAPKPKANQQKQDDGRGLVLPGYKYLGPFNGLDKGEPVNEADAAALEHDKAYDKQLEQGDNPYLKYNHADAEFQERLQEDTSFGGNLGRAVFQAKKRVLEPLGLVEEGAKTAPGKKRPVEPSPQRSPDSSTGIGKTGQQPAKKRLNFGQTGDSESVPDPQPIGEPPAGPSGLGSGTMAAGGGAPMADNNEGADGVGSSSGNWHCDSTWLGDRVITTSTRTWALPTYNNHLYKQISNGTSGGSTNDNTYFGYSTPWGYFDFNRFHCHFSPRDWQRLINNNWGFRPKRLNFKLFNIQVKEVTQNEGTKTIANNLTSTIQVFTDSEYQLPYVLGSAHQGCLPPFPADVFMIPQYGYLTLNNGSQAVGRSSFYCLEYFPSQMLRTGNNFEFSYQFEDVPFHSSYAHSQSLDRLMNPLIDQYLYYLSRTQSTGGTAGTQQLLFSQAGPNNMSAQAKNWLPGPCYRQQRVSTTLSQNNNSNFAWTGATKYHLNGRDSLVNPGVAMATHKDDEERFFPSSGVLMFGKQGAGKDNVDYSSVMLTSEEEIKTTNPVATEQYGVVADNLQQQNAAPIVGAVNSQGALPGMVWQNRDVYLQGPIWAKIPHTDGNFHPSPLMGGFGLKHPPPQILIKNTPVPADPPTTFSQAKLASFITQYSTGQVSVEIEWELQKENSKRWNPEIQYTSNYYKSTNVDFAVNTEGTYSEPRPIGTRYLTRNL

SEQ ID NO: 403 - DNA, 3197 bp, Adeno-associated virus
gaattcgccctttctacggctgcgtcaactggaccaatgagaactttcccttcaacgattgcgtcgacaagatggtgatctggtgggaggagggcaagatgacggccaaggtcgtggagtccgccaaggccattctcggcggcagcaaggtgcgcgtggaccaaaagtgcaagtcgtccgcccagatcgaccccacccccgtgatcgtcacctccaacaccaacatgtgcgccgtgattgacgggaacagcaccaccttcgagcaccagcagccgttacaagaccggatgttcaaatttgaactcacccgccgtctggagcacgactttggcaaggtgacaaagcaggaagtcaaagagttcttccgctgggcgcaggatcacgtgaccgaggtggcgcatgagttctacgtcagaaagggtggagccaacaagagacccgcccccgatgacgcggataaaagcgagcccaagcgggcctgcccctcagtcgcggatccatcgacgtcagacgcggaaggagctccggtggactttgccgacaggtaccaaaacaaatgttctcgtcacgcgggcatgcttcagatgctgtttccctgcaagacatgcgagagaatgaatcagaatttcaacatttgcttcacgcacgggaccagagactgttcagaatgtttccccggcgtgtcagaatctcaaccggtcgtcagaaagaggacgtatcggaaactctgtgccattcatcatctgctggggcgggctcccgagattgcttgctcggcctgcgatctggtcaacgtggacctggatgactgtgtttctgagcaataaatgacttaaaccaggtatggctgccgatggttatcttccagattggctcgaggacaacctctctgagggcattcgcgagtggtgggacttgaaacctggagccccgaaacccaaagccaaccagcaaaagcaggacgacggccggggtctggtgcttcctggctacaagtacctcggacccttcaacggactcgacaagggagagccggtcaacgaggcagacgccgcggccctcgagcacgacaaggcctacgacaagcagctcgagcagggggacaacccgtacctcaagtacaaccacgccgacgccgagtttcaggagcgtcttcaagaagatacgtcttttgggggcaacctcgggcgagcagtcttccaggccaagaagcgggttctcgaacctctcggtctggttgaggaaggcgctaagacggctcctggaaagaagagaccggtagagccatcaccccagcgttctccagactcctctacgggcatcggcaagacaggccagcagcccgcgaaaaagagactcaactttgggcagactggcgactcagagtcagtgcccgaccctcaaccaatcggagaaccccccgcaggcccctctggtctgggatctggtacaatggctgcaggcggtggcgctccaatggcagacaataacgaaggcgccgacggagtgggtagttcctcaggaaattggcattgcgattccacatggctgggcgacagagtcatcaccaccagcacccgaacctgggccctccccacctacaacaaccacctctacaagcaaatctccaacgggacatcgggaggaagcaccaacgacaacacctacttcggctacagcaccccctgggggtattttgactttaacagattccactgccacttctcaccacgtgactggcagcgactcatcaacaacaactggggattccggcccaagagactcaacttcaagctcttcaacatccaggtcaaggaggtcacgcagaatgaaggcaccaagaccatcgccaataaccttaccagcacgattcaggtctttacggactcggaataccagctcccgtacgtcctcggctctgcgcaccagggctgcctgcctccgttcccggcggacgtcttcatgattcctcagtacgggtacctgactctgaacaacggcagtcaggccgtgggccgttcctccttctactgcctggagtactttccttctcaaatgctgagaacgggcaacaactttgagttcagctaccagtttgaggacgtgccttttcacagcagctacgcgcacagccaaagcctggaccggctgatgaaccccctcatcgaccagtacctgtactacctgtctcggactcagtccacgggaggtaccgcaggaactcagcagttgctattttctcaggccgggcctaataacatgtcggctcaggccaaaaactggctacccgggccctgctaccggcagcaacgcgtctccacgacactgtcgcaaaataacaacagcaactttgcttggaccggtgccaccaagtatcatctgaatggcagagactctctggtaaatcccggtgtcgctatggcaacgcacaaggacgacgaagagcgattttttccatccagcggagtcttgatgtttgggaaacagggagctggaaaagacaacgtggactatagcagcgttatgctaaccagtgaggaagaaatcaaaaccaccaacccagtggccacagaacagtacggcgtggtggccgataacctgcaacagcaaaacgccgctcctattgtaggggccgtcaacagtcaaggagccttacctggcatggtctggcagaaccgggacgtgtacctgcagggtcctatctgggccaagattcctcacacggacggcaactttcatccttcgccgctgatgggaggctttggactgaaacacccgcctcctcagatcctgattaagaatacacctgttcccgcggatcctccaactaccttcagtcaagccaagctggcgtcgttcatcacgcagtacagcaccggacaggtcagcgtggaaattgaatgggagctgcagaaagagaacagcaagcgctggaacccagagattcagtatacttccaactactacaaatctacaaatgtggactttgctgtcaatactgagggtacttattcagagcctcgccccattggcacccgttacctcacccgtaacctgtaattgcctgttaatcaataaaccggttaattcgtttcagttgaactttggtctctgcgaagggcgaattcgtttaaacctgcaggactagtccctttagtgagggttaattctgagcttggcgtaatcatgggtcatag

SEQ ID NO: 404 - protein, 735 aa, Artificial Sequence
  Description of Artificial Sequence: Synthetic polypeptide
MAADGYLPDWLEDNLSEGIREWWDLKPGAPKPKANQQKQDDGRGLVLPGYKYLGPFNGLDKGEPVNEADAAALEHDKAYDKQLEQGDNPYLKYNHADAEFQERLQEDTSFGGNLGRAVFQAKKRVLEPLGLVEEGAKTAPGKKRPVEPSPQRSPDSSTGIGKTGQQPAKKRLNFGQTGDSESVPDPQPIGEPPAGPSGLGSGTMAAGGGAPMADNNEGADGVGSSSGNWHCDSTWLGDRVITTSTRTWALPTYNNHLYKQISNGTSGGSTNDNTYFGYSTPWGYFDFNRFHCHFSPRDWQRLINNNWGFRPRKLRFKLFNIQVKEVTTDDGVTTIANNLTSTIQVFSDSEYQLPYVLGSAHQGCLPPFPADVFMIPQYGYLTLNNGSQSVGRSSFYCLEYFPSQMLRTGNNFEFSYTFEEVPFHSSYAHSQSLDRLMNPLIDQYLYYLARTQSTTGSTRELQFHQAGPNTMAEQSKNWLPGPCYRQQRLSKNIDSNNNSNFAWTGATKYHLNGRNSLTNPGVAMATNKDDEDQFFPINGVLVFGKTGAANKTTLENVLMTSEEEIKTTNPVATEEYGVVSSNLQSSTAGPQTQTVNSQGALPGMVWQNRDVYLQGPIWAKIPHTDGNFHPSPLMDGFGLKHPPPQILIKNTPVPANPPEVFTPAKFASFITQYSTGQVSVEIEWELQKENSKRWNPEIQYTSNYAKSNNVEFAVNNEGVYTEPRPIGTRYLTRNL

SEQ ID NO: 405 - DNA, 3276 bp, Adeno-associated virus
gaattcgcccttcgcagagaccaaagttcaactgaaacgaattaaccggtttattgattaacaggcaattacaggttacgggtgaggtaacgggtgccaatggggcgaggctcagtataaaccccttcgttgttgacagcaaattccacattattagacttggcataatttgaggtgtactgaatctctggattccagcgtttgctgttttctttctgcagttcccactcgatctccacgctgacctggccggtgctgtactgcgtgataaatgaggcaaacttggcaggagtaaacacctctggaggattagcaggtaccggggtgtttttgatgagaatttgaggaggcgggtgtttgagtccaaatccgtccatcaggggagacgggtgaaagttgccgtccgtgtgaggaattttggcccagatgggaccctgcaggtacacgtcccggttctgccagaccatgccgggcagagccccctggctgttgacagtctgtgtctggggtccggccgtagacgattgcaggttgctggagaccacaccgtattcttctgtagccacgggattggtggttttgatctcctcctcgctggtcattagcacgttttccagcgttgtcttgttggcagcccccgttttgccaaaaaccagcactccgttgatgggaaagaactggtcctcgtcgtccttgttggtggccatggctacgcccgggttggttaatgaatttctaccattcagatggtatttagtggccccggtccaggcaaagttactgttgttgttgctgtctatgttttttgacagtctctgctgccgataacagggtccgggcagccagttctttgattgctcggccatggtgttgggcccagcctgatggaactgcagctcccttgtggaccccgtagtgctctgggtccgggccaggtagtacaggtactggtcgatgaggggattcatcagccggtccaggctctggctatgcgcatagctgctgtggaaaggcacttcctcaaaggtgtagctgaattcaaagttattgcccgttctcagcatctgagaaggaaagtactccaggcagtagaaggaggaacgtcccacagactgactgccgttgtttagagtcagatatccgtactgaggaatcatgaacacgtccgcagggaacggagggaggcagccctggtgcgcagagccgaggacgtacggcagttggtactccgagtccgagaagacctgaatcgtgctggtaaggttattagcgatggtcgtaacgccgtcgtccgtcgtgacctccttgacctggatgttgaacaacttgaaccgcagctttctgggccggaatccccagttgttgttgatgagtcgctgccagtcacgtggtgagaagtggcagtggaatctgttaaagtcaaaatacccccagggggtgctgtagccgaagtaggtgttgtcgttggtgcttcctcccgatgtcccgttggagatttgcttgtagaggtggttgttgtaggtggggagggcccaggttcgggtgctggtggtgatgactctgtcgcccagccatgtggaatcgcaatgccaatttcctgaggaactacccactccgtcggcgccttcgttattgtctgccattggagcgccaccgcctgcagccattgtaccagatcccagaccagaggggcctgcggggggttctccgattggttgagggtcgggcactgactctgagtcgccagtctgcccaaagttgagtctctttttcgcgggctgctggcctgtcttgccgatgcccgtagaggagtctggagaacgctggggtgatggctctaccggtctcttctttccaggagccgtcttagcgccttcctcaaccagaccgagaggttcgagaacccgcttcttggcctggaagactgctcgcccgaggttgcccccaaaagacgtatcttcttgaagacgctcctgaaactcggcgtcggcgtggttgtacttgaggtacgggttgtccccctgctcgagctgcttgtcgtaggccttgtcgtgctcgagggccgcggcgtctgcctcgttgaccggctctcccttgtcgagtccgttgaagggtccgaggtacttgtagccaggaagcaccagaccccggccgtcgtcctgcttttgctggttggctttgggtttcggggctccaggtttcaagtcccaccactcgcgaatgccctcagagaggttgtcctcgagccaatctggaagataaccatcggcagccatacctggtttaagtcatttattgctcagaaacacagtcatccaggtccacgttgaccagatcgcaggccgagcaagcaatctcgggagcccgccccagcagatgatgaatggcacagagtttccgatacgtcctctttctgacgaccggttgagattctgacacgccggggaaacattctgaacagtctctggtcccgtgcgtgaagcaaatgttgaaattctgattcattctctcgcatgtcttgcagggaaacagcatctgaagcatgcccgcgtgacgagaacacttgttttggtacctgtcggcaaagtccaccggagctccttccgcgtctgacgtcgatggatgcaaaatgtcgcaaaagcactcacgtgacagctaatacaggaccactcccctatgacgtgatttacgtcagcgctatgcccgcgtgacgagaacatttgttttggtacctgtcggcaaagtccaccggagctccttccgcgtctgacgtcgatggatccgcgactgaggggcaggcccgcttgggctcgcttttatccgcgtcatcgggggcgggtctcttgttggctccaccctttctgacgtagaactcatgcgccacctcggtcacgtgatcctgcgcccagcggaagaactctttgacttcctgctttgtcaccttgccaaagtcatgctccagacggcgggtgagttcaaatttgaacatccggtcctgcaacggctgctggtgctcgaaggtggtgctgttcccgtcaatcacggcgcacatgttggtgttggaagtgacgatcacgggggtgggatcgatctgggcggaagacttgcacttttggtccacgcgcaccttgctgccgccgagaatggccttggcggactccacgaccttggccgtcatcttgccctcctcccaccagatcaccatcttgtcgacgcaatcgttgaagggaaagttctcattggtccagttgacgcagccgtagaaagggcgaattc

SEQ ID NO: 406 - protein, 738 aa, Adeno-associated virus; identical to SEQ ID NO: 71

SEQ ID NO: 407 - protein, 738 aa, Adeno-associated virus
MAADGYLPDWLEDNLSEGIREWWDLKPGAPKPKANQQKQDDGRGLVLPGYKYLGPFNGLDKGEPVNAADAAALEHDKAYDQQLKAGDNPYLRYNHADAEFQERLQEDTSFGGNLGRAVFQAKKRVLEPLGLVEEGAKTAPGKKRPVEPSPQRSPDSSTGIGKKGHQPARKRLNFGQTGDSESVPDPQPIGEPPAGPSGLGSGTMAAGGGAPMADNNEGADGVGSSSGNWHCDSTWLGDRVITTSTRTWALPTYNNHLYKQISNGTSGGSTNDNTYFGYSTPWGYFDFNRFHCHFSPRDWQRLINNNWGFRPKRLNFKLFNIQVKEVTQNEGTKTIANNLTSTIQVFTDSEYQLPYVPGSAHQGCLPPFPADVFMIPQYGYLTLNNGSQAVGRSSFYCLEYFPSQMLRTGNNFEFSYTFEDVPFHSSYAHSQSLDRLMNPLIDQYLYYLSRTQSTGGTQGTQQLLFSQAGPANMSAQAKNWLPGPCYRQQRVSTTLSQNNNSNFAWTGATKYHLNGRDSLVNPGVAMATHKDDEERFFPSSGVLMFGKQGAGKDNVDYSSVMLTSEEEIKTTNPVATEQYGVVADNLQQTNGAPIVGTVNSQGALPGMVWQNRDVYLQGPIWAKIPHTDGNFHPSPLMGGFGLKHPPPQILIKNTPVPADPPTTFSQAKLASFITQYSTGQVSVEIEWELQKENSKRWNPEIQYTSNYYKSTNVDFAVNTEGTYSEPRPIGTRYLTRNL

SEQ ID NO: 408 - protein, 738 aa, Adeno-associated virus; identical to SEQ ID NO: 69

SEQ ID NO: 409 - protein, 728 aa, Artificial Sequence
  Description of Artificial Sequence: Synthetic polypeptide
MAADGYLPDWLEDNLSEGIREWWDLKPGAPKPKANQQKQDDGRGLVLPGYKYLGPFNGLDKGEPVNEADAAALEHDKAYDKQLEQGDNPYLKYNHADAEFQERLQEDTSFGGNLGRAVFQAKKRVLEPLGLVEEGAKTAPGKKRPIESPDSSTGIGRKGQQPAKKKLNFGQTGDSESVPDPQPIGEPPAGPSGLGSGTMAAGGGAPMADNNEGADGVGNASGNWHCDSTWLGDRVITTSTRTWALPTYNNHLYKQISSQSGATNDNHFFGYSTPWGYFDFNRFHCHFSPRDWQRLINNNWGFRPRKLRFKLFNIQVKEVTTNDGVTTIANNLTSTIQVFSDSEYQLPYVLGSAHQGCLPPFPADVFMIPQYGYLTLNNGSQSVGRSSFYCLEYFPSQMLRTGNNFEFSYTFEEVPFHSSYAHSQSLDRLMNPLIDQYLYYLARTQSTTGSTRELQFHQAGPNTMAEQSKNWLPGPCYRQQRLSKNIDSNNNSNFAWTGATKYHLNGRNSLTNPGVAMATNKDDEDQFFPINGVLVFGKTGAANKTTLENVLMTSEEEIKTTNPVATEEYGVVSSNLQSSTAGPQTQTVNSQGALPGMVWQNRDVYLQGPIWAKIPHTDGNFHPSPLMGGFGLKHPPPQILIKNTPVPANPPEVFTPAKFASFITQYSTGQVSVEIEWELQKENSKRWNPEIQYTSNYAKSNNVEFAVNNEGVYTEPRPIGTRYLTRNL

SEQ ID NO: 410 - DNA, 2489 bp, Adeno-associated virus
gaattcgccctttctacggctgcgtcaactggaccaatgagaactttcccttcaacgattgcgtcgacaagatggtgatctggtgggaggagggcaagatgacggccaaggtcgtgaagtccgccaaggccattcatcatctgctggggcgggctcccgagattgcttgctcggcctgcgatctggtcaacgtggacctggatgactgtgtttctgagcaataaatgacttaaaccaggtatggctgccgatggttatcttccagattggctcgaggacaacctctctgagggcattcgcgagtggtgggacttgaaacctggagccccgaaacccaaagccaaccagcaaaagcaggacgacggccggggtctggtgcttcctggctacaagtacctcggacccttcaacggactcgacaagggagagccggtcaacgaggcagacgccgcggccctcgagcacgacaaggcctacgacaagcagctcgagcagggggacaacccgtacctcaagtacaaccacgccgacgccgagtttcaggagcgtcttcaagaagatacgtcttttgggggcaacctcgggcgagcagtcttccaggccaagaagcgggttctcgaacctctcggtctggttgaggaaggcgctaagacggctcctggaaagaagagacccatagaatcccccgactcctccacgggcatcggcaggaaaggccagcagcccgctaaaaagaagctcaactttgggcagactggcgactcagagtcagtgcccgaccctcaaccaatcggagaaccccccgcaggcccctctggtctgggatctggtacaatggctgcaggcggtggcgctccaatggcagacaataacgaaggcgccgacggagtgggtaatgcctccggaaattggcattgcgattccacatggctgggcgacagagtcatcaccaccagcacccgcacctgggccctgcccacctacaacaaccacctctacaagcagatatcaagtcagagcggggctaccaacgacaaccacttcttcggctacagcaccccctggggctattttgacttcaacagattccactgccacttctcaccacgtgactggcagcgactcatcaacaacaactggggattccggcccagaaagctgcggttcaagttgttcaacatccaggtcaaggaggtcacgacgaacgacggcgttacgaccatcgccaataaccttaccagcacgattcaggtcttctcggactcggagtaccaactgccgtacgtcctcggctctgcgcaccagggctgcctccctccgttccctgcggacgtgttcatgattcctcagtacggatatctgactctaaacaacggcagtcagtctgtgggacgttcctccttctactgcctggagtactttccttctcagatgctgagaacgggcaataactttgaattcagctacacctttgaggaagtgcctttccacagcagctatgcgcacagccagagcctggaccggctgatgaatcccctcatcgaccagtacctgtactacctggcccggacccagagcactacggggtccacaagggagctgcagttccatcaggctgggcccaacaccatggccgagcaatcaaagaactggctgcccggaccctgttatcggcagcagagactgtcaaaaaacatagacagcaacaacaacagtaactttgcctggaccggggccactaaataccatctgaatggtagaaattcattaaccaacccgggcgtagccatggccaccaacaaggacgacgaggaccagttctttcccatcaacggagtgctggtttttggcaaaacgggggctgccaacaagacaacgctggaaaacgtgctaatgaccagcgaggaggagatcaaaaccaccaatcccgtggctacagaagaatacggtgtggtctccagcaacctgcaatcgtctacggccggaccccagacacagactgtcaacagccagggggctctgcccggcatggtctggcagaaccgggacgtgtacctgcagggtcccatctgggccaaaattcctcacacggacggcaactttcacccgtctcccctgatgggcggatttggactcaaacacccgcctcctcaaattctcatcaaaaacaccccggtacctgctaatcctccagaggtgtttactcctgccaagtttgcctcatttatcacgcagtacagcaccggccaggtcagcgtggagatcgagtgggaactgcagaaagaaaacagcaaacgctggaatccagagattcagtacacctcaaattatgccaagtctaataatgtggaatttgctgtcaacaacgaaggggtttatactgagcctcgccccattggcacccgttacctcacccgtaacctgtaattgcctgttaatcaataaaccggttaattcgtttcagttgaactttggtcaagggcgaattc

SEQ ID NO: 411 - protein, 728 aa, Artificial Sequence
  Description of Artificial Sequence: Synthetic polypeptide
MAADGYLPDWLEDNLSEGIREWWDLKPGAPKPKANQQKQDDGRGLVLPGYKYLGPFNGLDKGEPVNAADAAALEHDKAYDQQLKAGDNPYLRYNHADAEFQERLQEDTSFGGNLGRAVFQAKKRVLEPLGLVEEGAKTAPGKKRPIESPDSSTGIGKKGQQPAKKKLNFGQTGDSESVPDPQPIGEPPAGPSGLGSGTMAAGGGAPMADNNEGADGVGNASGNWHCDSTWLGDRVITTSTRTWALPTYNNHLYKQISSQSGATNDNHFFGYSTPWGYFDFNRFHCHFSPRDWQRLINNNWGFRPRKLRFKLFNIQVKEVTTNDGVTTIANNLTSTIQVFSDSEYQLPYVLGSAHQGCLPPFPADVFMIPQYGYLTLNNGSQSVGRSSFYCLEYFPSQMLRTGNNFEFSYTFEEVPFHSSYAHSQSLDRLMNPLIDQYLYYLARTQSTTGSTRELQFHQAGPNTMAEQSKNWLPGPCYRRQRLSKDIDSNNNSNFAWTGATKYHLNGRNSLTNPGVAMATNKDDEDQFFPINGVLVFGKTGAANKTTLENVLMTSEEEIKTTNPVATEEYGVVSSNLQSSTAGPQTQTVNSQGALPGMVWQNRDVYLQGPIWAKIPHTDGNFHPSPLMGGFGLKHPPPQILIKNTPVPANPPEVFTPAKFASFITQYSTGQVSVEIEWELQKENSKRWNPEIQYTSNYAKSNNVEFAVNNEGVYTEPRPIGTRYLTRNL

SEQ ID NO: 412 - DNA, 3098 bp, Adeno-associated virus
gaattcgccctttctacggctgcgtcaactggaccaatgagaactttcccttcaacgattgcgtcgacaagatggtgatctggtgggaggagggcaagatgacggccaaggtcgtggagtccgccaaggccattctcggcggcagcaaggtgcgcgtggaccaaaagtgcaagtcttccgcccagatcgatcccacccccgtgatcgtcacttccaacaccaacatgtgcgccgtgattgacgggaacagcaccaccttcgagcaccagcagccgttacaagaccggatgttcaaatttgaactcacccgccgtctggagcacgactttggcaaggtgacaaagcaggaagtcaaagagttcttccgctgggcgcaggatcacgtgaccgaggtggcgcatgagttctacgtcagaaagggtggagccaacaagagacccgcccccgatgacgcggataaaagcgagcccaagcgggcctgcccctcagtcgcggatccatcgacgtcagacgcggaaggagctccggtggactttgccgacaggtaccaaaacaaatgttctcgtcacgcgggcatgcttcagatgctgtttccctgcaagacatgcgagagaatgaatcagaatttcaacatttgcttcacgcacgggaccggagactgttcagaatgtttccccggcgtgtcagaatctcaaccggtcgtcagaaagaggacgtatcggaaactctgtgccattcatcatctgctggggcgggctcccgagattgcttgctcggcctgcgatctggtcaacgtggacctggatgactgtgtttctgagcaataaatgacttaaaccaggtatggctgccgatggttatcttccagattggctcgaggacaacctctctgagggcattcgcgagtggtgggacttgaaacctggagccccgaaacccaaagccaaccagcaaaagcaggacgacggccggggtctggtgcttcctggctacaagtacctcggacccttcaacggactcgacaagggagagccggtcaacgcggcggacgcagcggccctcgagcacgacaaggcctacgaccagcagctcaaagcgggtgacaatccgtacctgcggtataaccacgccgacgccgagtttcaggagcgtcttcaagaagatacgtcttttgggggcaacctcgggcgagcagtcttccaggccaagaagcgggttctcgaacctctcggtctggttgaggaaggcgctaagacggctcctggaaagaagagacccatagaatcccccgactcctccacgggcatcggcaagaaaggccagcagcccgctaaaaagaagctcaactttgggcagactggcgactcagagtcagtgcccgaccctcaaccaatcggagaaccccccgcaggcccctctggtctgggatctggtacaatggctgcaggcggtggcgctccaatggcagacaataacgaaggcgccgacggagtgggtaatgcctccggaaattggcattgcgattccacatggctgggcgacagagtcatcaccaccagcacccgcacctgggccctgcccacctacaacaaccacctctacaagcagatatcaagtcagagcggggctaccaacgacaaccacttcttcggctacagcaccccctggggctattttgacttcaacagattccactgccacttctcaccacgtgactggcagcgactcatcaacaacaactggggattccggcccagaaagctgcggttcaagttgttcaacatccaggtcaaggaggtcacgacgaacgacggcgttacgaccatcgctaataaccttaccagcacgattcaggtcttctcggactcggagtaccaactgccgtacgtcctcggctctgcgcaccagggctgcctccctccgttccctgcggacgtgttcatgattcctcagtacggatatctgactctaaacaacggcagtcagtctgtgggacgttcctccttctactgcctggagtactttccttctcagatgctgagaacgggcaataactttgaattcagctacacctttgaggaagtgcctttccacagcagctatgcgcacagccagagcctggaccggctgatgaatcccctcatcgaccagtacctgtactacctggcccggacccagagcactacggggtccacaagggagctgcagttccatcaggctgggcccaacaccatggccgagcaatcaaagaactggctgcccggaccctgttatcggcggcagagactgtcaaaagacatagacagcaacaacaacagtaactttgcctggaccggggccactaaataccatctgaatggtagaaattcattaaccaacccgggcgtagccatggccaccaacaaggacgacgaggaccagttctttcccatcaacggagtgctggtttttggcaaaacgggggctgccaacaagacaacgctggaaaacgtgctaatgaccagcgaggaggagatcaaaaccaccaatcccgtggctacagaagaatacggtgtggtctccagcaacctgcaatcgtctacggccggaccccagacacagactgtcaacagccagggggctctgcccggcatggtctggcagaaccgggacgtgtacctgcagggtcccatctgggccaaaattcctcacacggacggcaactttcacccgtctcccctgatgggcggatttggactcaaacacccgcctcctcaaattctcatcaaaaacaccccggtacctgctaatcctccagaggtgtttactcctgccaagtttgcctcatttatcacgcagtacagcaccggccaggtcagcgtggagatcgagtgggaactgcagaaagagaacagcaaacgctggaatccagagattcagtacacctcaaattatgccaagtctaataatgtggaatttgctgtcaacaacgaaggggtttatactgagcctcgccccattggcacccgttacctcacccgtaacctgtaattacttgttaatcaataaaccggttgattcgtttcagttgaactttggtctctgcgaagggcgaattc

SEQ ID NO: 413 - protein, 685 aa, Artificial Sequence
  Description of Artificial Sequence: Synthetic polypeptide
MAADGYLPDWLEDNLSEGIREWWDLKPGAPKPKANQQKQDDGRGLVLPGYKYLGPFNGLDKGEPVNEADAAALEHDKAYDKQLEQGDNPYLKYNHADAEFQERLQEDTSFGGNLGRAVFQAKKRVLEPLGLVEEGAKTAPGKKRPVEPSPQRSPDSSTGIGKTGQQPAKKRLNFGQTGDSESVPDPQPIGEPPAGPSGLGSGTMAAGGGAPMADNNEGADGVGSSSGNWHCDSTWLGDRVITTSTRTWALPTYNNHLYKQISNGTSGGSTNDNTYFGYSTPWGYFDFNRFHCHFSPRDWQRLINNNWGFRPKRLNFKLFNIQVKEVTQNEGTKTIANNLTSTIQVFTDSEYQLPYVLGSAHQGCLPPFPADVFMIPQYGYLTLNNGSQAVGRSSFYCLEYFPSQMLRTGNNFEFSYQFEDVPFHSSYAHSQSLDRLTNPLIDQYLYYLARTQSTTGSTRGLQFHQAGPNTMAEQSKNWLPGPCYRQQRLSKNIDSNNNSNFAWTGATKYHLNGRNSLTNPGVAMATNKDDEDQFFPINGVLVFGKTGAANKTTLENVLMTSEEEIKTTNPVATEEYGVVSSNLQSSTAGPQTQTVNSQGALPGMVWQNRDVYLQGPIWAKIPHTDGNFHPSPLMGGFGLKHPPPQILIKYTSNYYKSTNVDFAVNTEGTYSEPRPIGTRYLTRNL

SEQ ID NO: 414 - DNA, 2969 bp, Adeno-associated virus
gaattcgccctttctacggctgcgtcaactggaccaatgagaactttcccttcaacgattgcgtcgacaagatggtgatctggtgggaggagggcaagatgacggccaaggtcgtggagtccgccaaggccattctcggcggcagcaaggtgcgcgtggaccaaaagtgcaagtcgtccgcccagatcgaccccacccccgtgatcgtcacctccaacaccaacatgtgcgccgtgattgacgggaacagcaccaccttcgagcaccagcagccgttacaagaccggatgttcaaatttgaactcacccgccgtctggagcacgactttggcaaggtgacaaagcaggaagtcaaagagttcttccgctgggcgcaggatcacgtgaccgaggtggcgcatgagttctacgtcagaaagggtggagccaacaagagacccgcccccgatgacgcggataaaagcgagcccaagcgggcctgcccctcagtcgcggatccatcgacgtcagacgcggaaggagctccggtggactttgccgacaggtaccaaaacaaatgttctcgtcacgcgggcatgcttcagatgctgtttccctgcaagacatgcgagagaatgaatcagaatttcaacatttgcttcacgcacgggaccagagactgttcagaatgtttccccggcgtgtcagaatctcaaccggtcgtcagaaagaggacgtatcggaaactctgtgccattcatcatctgctggggcgggctcccgagattgcttgctcggcctgcgatctggtcaacgtggacctggatgactgtgtttctgagcaataaatgacttaaaccaggtatggctgccgatggttatcttccagattggctcgaggacaacctctctgagggcatccgcgagtggtgggacttgaaacctggagccccgaaacccaaagccaaccagcaaaagcaggacgacggccggggtctggtgcttcctggctacaagtacctcggacccttcaacggactcgacaagggagagccggtcaacgaggcagacgccgcggccctcgagcacgacaaggcctacgacaagcagctcgagcagggggacaacccgtacctcaagtacaaccacgccgacgccgagtttcaggagcgtcttcaagaagatacgtcttttgggggcaacctcgggcgagcagtcttccaggccaagaagcgggttctcgaacctctcggtctggttgaggaaggcgctaagacggctcctggaaagaagagaccggtagagccatcaccccagcgttctccagactcctctacgggcatcggcaagacaggccagcagcccgcgaaaaagagactcaactttgggcagactggcgactcagagtcagtgcccgaccctcaaccaatcggagaaccccccgcaggcccctctggtctgggatctggtacaatggctgcaggcggtggcgctccaatggcagacaataacgaaggcgccgacggagtgggtagttcctcaggaaattggcattgcgattccacatggctgggcgacagagtcatcaccaccagcacccgaacctgggccctccccacctacaacaaccacctctacaagcaaatctccaacgggacatcgggaggaagcaccaacgacaacacctacttcggctacagcaccccctgggggtattttgactttaacagattccactgccacttctcaccacgtgactggcagcgactcatcaacaacaactggggattccggcccaagagactcaacttcaagctcttcaacatccaggtcaaggaggtcacgcagaatgaaggcaccaagaccatcgccaataaccttaccagcacgattcaggtctttacggactcggaataccagctcccgtacgtcctcggctctgcgcaccagggctgcctgcctccgttcccggcggacgtcttcatgattcctcagtacgggtacctgactctgaacaacggcagtcaggccgtgggccgttcctccttctactgcctggagtactttccttctcaaatgctgagaacgggcaacaactttgagttcagctaccagtttgaggacgtgccttttcacagcagctacgcgcacagccaaagcctggaccggctgacgaaccccctcatcgaccagtacctgtactacctggcccggacccagagcactacggggtccacaagggggctgcagttccatcaggctgggcccaacaccatggccgagcaatcaaagaactggctgcccggaccctgttatcggcagcagagactgtcaaaaaacatagacagcaacaacaacagtaactttgcctggaccggggccactaaataccatctgaatggtagaaattcattaaccaacccgggcgtagccatggccaccaacaaggacgacgaggaccagttctttcccatcaacggagtgctggtttttggcaaaacgggggctgccaacaagacaacgctggaaaacgtgctaatgaccagcgaggaggagatcaaaaccaccaatcccgtggctacagaagaatacggtgtggtctccagcaacctgcaatcgtctacggccggaccccagacacagactgtcaacagccagggggctctgcccggcatggtctggcagaaccgggacgtgtacctgcagggtcccatctgggccaaaattcctcacacggacggcaactttcacccgtctcccctgatgggcggatttggactcaaacacccgcctcctcaaattctcatcaagtatacttccaactactacaaatctacaaatgtggactttgctgtcaatactgagggtacttattcagagcctcgccccattggcacccgttacctcacccgtaacctgtaattgcctgttaatcaataaaccggttaattcgtttcagttgaactttggtctctgcgaagggcgaattc

SEQ ID NO: 415 - protein, 733 aa, Artificial Sequence
  Description of Artificial Sequence: Synthetic polypeptide
MAADGYLPDWLEDNLSEGIREWWDLKPGAPKPKANQQKQDDGRGLVLPGYKYLGPFNGLDKGEPVNAADAAALEHDKAYDQQLKAGDNPYLRYNHADAEFQERLQEDTSFGGNLGRAVFQAKKRVLEPLGLVEEGAKTAPGKKRPIESPDSSTGIGKKGQQPAKKKLNFGQTGDSESVPDPQPIGEPPAGPSGLGSGTMAAGGGAPMADNNEGADGVGSSSGNWHCDSTWLGDRVITTSTRTWALPTYNNHLYKQISNGTSGGSTNDNTYFGYSTPWGYFDFNRFHCHFSPRDWQRLINNNWGFRPKRLNFKLFNIQVKEVTQNEGTKTIANNLTSTIQVFTDSEYQLPYVLGSAHQGCLPPFPADVFMIPQYGYLTLNNGSQAVGRSSFYCLEYFPSQMLRTGNNFEFSYQFEDVPFHSSYAHSQSLDRLMNPLIDQYLYYLSRTQSTGGTAGTQQLLFSQAGPNNMSAQAKNWLPGPCYRQQRVSTTVSQNNNSNFAWTGATKYHLNGRDSLVNPGVAMATHKGDEERFFPSSGVLMFGKQGAGKDNVDYSSVMLTSEEEIKTTNPVATEQYGVVADNLQQQNAAPIVGAVNSQGALPGMVWQNRDVYLQGPIWAKIPHTDGNFHPSPLMGGFGLKHPPPQILIKNTPVPADPPTTFSQAKLASFITQYSTGQVSVEIEWELQKENSKRWNPEIQYTSNYYKSTNVDFAVNTEGTYSEPRPIGTRYLTRSL

SEQ ID NO: 416 - DNA, 3113 bp, Adeno-associated virus
gaattcgccctttctacggctgcgtcaactggaccaatgagaactttcccttcaacgattgcgtcgacaagatggtgatctggtgggaggagggcaagatgacggccaaggtcgtggagtccgccaaggccattctcggcggcagcaaggtgcgcgtggaccaaaagtgcaagtcgtccgcccagatcgatcccacccccgtgatcgtcacttccaacaccaacatgtgcgccgtgattgacgggaacagcaccaccttcgagcaccagcagccgttacaagaccggatgttcaaatttgaactcacccgccgtctggagcatgactttggcaaggtgacaaagcaggaagtcaaagagttcttccgctgggcgcaggatcacgtgaccgaggtggcgcatgagttctacgtcagaaagggtggagccaacaagagacccgcccccgatgacgcggataaaagcgagcccaagcgggcctgcccctcagtcgcggatccatcgacgtcagacgcggaaggagctccggtggactttgccgacaggtaccaaaacaaatgttctcgtcacgcgggcatgcttcagatgctgtttccctgcaagacatgcgagagaatgaatcagaatttcaacatttgcttcacgcacgggaccagagactgttcagaatgtttccccggcgtgtcagaatctcaaccggtcgtcagaaagaggacgtatcggaaactctgtgccattcatcatctgctggggcgggctcccgagattgcttgctcggcctgcgatctggtcaacgtggacctggatgactgtgtttctgagcaataaatgacttaaaccaggtatggctgccgatggttatcttccagattggctcgaggacaacctctctgagggcattcgcgagtggtgggacttgaaacctggagccccgaaacccaaagccaaccagcaaaagcaggacgacggccggggtctggtgcttcctggctacaagtacctcggacccttcaacggactcgacaagggggagcccgtcaacgcggcggacgcagcggccctcgagcacgacaaggcctacgaccagcagctcaaagcgggtgacaatccgtacctgcggtataaccacgccgacgccgagtttcaggagcgtcttcaagaagatacgtcttttgggggcaacctcgggcgagcagtcttccaggccaagaagcgggttctcgaacctctcggtctggttgaggaaggcgctaagacggctcctggaaagaagagacccatagaatcccccgactcctccacgggcatcggcaagaaaggccagcagcccgctaaaaagaagctcaactttgggcagactggcgactcagagtcagtgcccgaccctcaaccaatcggagaaccccccgcaggcccctctggtctgggatctggtacaatggctgcaggcggtggcgctccaatggcagacaataacgaaggcgccgacggagtgggtagttcctcaggaaattggcattgcgattccacatggctgggcgacagagtcatcaccaccagcacccgaacctgggccctccccacctacaacaaccacctctacaagcaaatctccaacgggacatcgggaggaagcaccaacgacaacacctacttcggctacagcaccccctgggggtattttgactttaacagattccactgccacttctcaccacgtgactggcagcgactcatcaacaacaactggggattccggcccaagagactcaacttcaagctcttcaacatccaggtcaaggaggtcacgcagaatgaaggcaccaagaccatcgccaataaccttaccagcacgattcaggtctttacggactcggaataccagctcccgtacgtcctcggctctgcgcaccagggctgcctgcctccgttcccggcggacgtcttcatgattcctcagtacgggtacctgactctgaacaacggcagtcaggccgtgggccgttcctccttctactgcctggagtactttccttctcaaatgctgagaacgggcaacaactttgagttcagctaccagtttgaggacgtgccttttcacagcagctatgcgcacagccaaagcctggaccggctgatgaaccccctcatcgaccagtacctgtactacctgtctcggactcagtccacgggaggtaccgcaggaactcagcagttgctattttctcaggccgggcctaataacatgtcggctcaggccaaaaactggctacccgggccctgctaccggcagcaacgcgtctccacgacagtgtcgcaaaataacaacagcaactttgcttggaccggtgccaccaagtatcatctgaatggcagagactctctggtaaatcccggtgtcgctatggcaacgcacaagggcgacgaagagcgattttttccatccagcggagtcttgatgtttgggaaacagggagctggaaaagacaacgtggactatagcagcgttatgctaaccagtgaggaagaaatcaaaaccaccaacccagtggccacagaacagtacggcgtggtggccgataacctgcaacagcaaaacgccgctcctattgtaggggccgtcaacagtcaaggagccttacctggcatggtctggcagaaccgggacgtgtacctgcagggtcctatctgggccaagattcctcacacggacggcaactttcatccttcgccgctgatgggaggctttggactgaaacacccgcctcctcagatcctgattaagaatacacctgttcccgcggatcctccaactaccttcagtcaagccaagctggcgtcgttcatcacgcagtacagcaccggacaggtcagcgtggaaattgaatgggagctgcagaaagagaacagcaagcgctggaacccagagattcagtatacttccaactactacaaatctacaaatgtggactttgctgtcaatactgagggtacttattcagagcctcgccccattggcacccgttacctcacccgtagcctgtaattgcctgttaatcaataaaccggttgattcgtttcagttgaactttggtctctgcgaagggcgaattc

SEQ ID NO: 417 - protein, 738 aa, Artificial Sequence
  Description of Artificial Sequence: Synthetic polypeptide
MAADGYLPDWLEDNLSEGIREWWDLKPGAPKPKANQQKQDDGRGLVLPGYKYLGPFNGLDKGEPVNAADAAALEHDKAYDQQLKAGDNPYLRYNHADAEFQERLQEDTSFGGNLGRAVFQAKKRVLEPLGLVEEGAKTAPGKKRPVEPSPQRSPDSSTGIGKTGQQPAKKRLNFGQTGDSESVPDPQPIGEPPAGPSGLGSGTMAAGGGAPMADNNEGADGVGSSSGNWHCDSTWLGDRVITTSTRTWALPTYNNHLYKQISNGTSGGSTNDNTYFGYSTPWGYFDFNRFHCHFSPRDWQRLINNNWGFRPKRLNFKLFNIQVKEVTQNEGTKTIANNLTSTIQVFTDSEYQLPYVLGSAHQGCPPPFPADVFMIPQYGYLTLNNGSQAVGRSSFYCLEYFPSQMRRTGNNFEFSYQFEDVPFHSSYAHSQSLDRLMNPLIDQYLYYLSRTQSTGGTAGTQQLLFSQAGPNNMSAQAKNWLPGPCYRQQRVSTTLSQNNNSNFAWTGATKYHLNGRDSLVNPGVAMATHKDDEERFFPSSGVLMFGKQGAGKDNVDYSSVMLTSEEEIKTTNPVATEQYGVVADNLQQQNAAPIVGAVNSQGALPGMVWQNRDVYLQGPIWAKIPHTDGNFHPSPLMGGFGLKHPPPQILIKNTPVPADPPTTFSQAKLASFITQYSTGQVSVEIEWELQKENSKRWNPEIQYTSNYYKSTNVDFAVNTEGTYSEPRPIGTRYLTRNL

SEQ ID NO: 418 - DNA, 3128 bp, Adeno-associated virus
gaattcgccctttctacggctgcgtcaactggaccaatgagaactttcccttcaacgattgcgtcgacaagatggtgatctggtgggaggagggcaagatgacggccaaggtcgtggagtccgccaaggccattctcggcggcagcaaggtgcgcgtggaccaaaagtgcaagtcgtccgcccagatcgaccccacccccgtgatcgtcacctccaacaccaacatgtgcgccgtgattgacgggaacagcaccaccttcgagcaccagcagccgttgcaggaccggatgttcaaatttgaactcacccgccgtctggagcatgactttggcaaggtgacaaagcaggaagtcaaagagttcttccgctgggcgcaggatcacgtgaccgaggtggcgcatgagttctacgtcagaaagggtggagccaacaagagacccgcccccgatgacgcggataaaagcgagcccaagcgggcctgcccctcagtcgcggatccatcgacgtcagacgcggaaggagctccggtggactttgccgacaggtaccaaaacaaatgttctcgtcacgcgggcatgcttcagatgctgtttccctgcaagacatgcgagagaatgaatcagaatttcaacatttgcttcacgcgcgggaccagagactgttcagaatgtttcccgggcgtgtcagaatctcaaccggtcgtcagaaagaggacgtatcggaaactctgtgccattcatcatctgctggggcgggctcccgagattgcttgctcggcctgcgatctggtcaacgtggacctggatgactgtgtttctgagcaataaatgacttaaaccaggtatggctgccgatggttatcttccagattggctcgaggacaacctctctgagggcattcgcgagtggtgggacttgaaacctggagccccgaaacccaaagccaaccagcaaaagcaggacgacggccggggtctggtgcttcctggctacaagtacctcggacccttcaacggactcgacaagggggagcccgtcaacgcggcggacgcagcggccctcgagcacgacaaggcctacgaccagcagctcaaagcgggtgacaatccgtacctgcggtataaccacgccgacgccgagtttcaggagcgtctgcaagaagatacgtcttttgggggcaacctcgggcgagcagtcttccaggccaagaagcgggttctcgaacctctcggtctggttgaggaaggcgctaagacggctcctggaaagaagagaccggtagagccatcaccccagcgttctccagactcctctacgggcatcggcaagacaggccagcagcccgcgaaaaagagactcaactttgggcagactggcgactcagagtcagtgcccgaccctcaaccaatcggagaaccccccgcaggcccctctggtctgggatctggtacaatggctgcaggcggtggcgctccaatggcagacaataacgaaggcgccgacggagtgggtagttcctcaggaaattggcattgcgattccacatggctgggcgacagagtcatcaccaccagcacccgaacctgggccctccccacctacaacaaccacctctacaagcaaatctccaacgggacatcgggaggaagcaccaacgacaacacctacttcggctacagcaccccctgggggtattttgactttaacagattccactgccacttctcaccacgtgactggcagcgactcatcaacaacaactggggattccggcccaagagactcaacttcaagctcttcaacatccaggtcaaggaggtcacgcagaatgaaggcaccaagaccatcgccaataaccttaccagcacgattcaggtctttacggactcggaataccagctcccgtacgtcctcggctctgcgcaccagggctgcccgcctccgttcccggcggacgtcttcatgattcctcagtacgggtacctgactctgaacaacggcagtcaggccgtgggccgttcctccttctactgcctggagtactttccttctcaaatgcggagaacgggcaacaactttgagttcagctaccagtttgaggacgtgccttttcacagcagctacgcgcatagccaaagcctggaccggctgatgaaccccctcatcgaccagtacctgtactacctgtctcggactcagtccacgggaggtaccgcaggaactcagcagttgctattttctcaggccgggcctaataacatgtcggctcaggccaaaaactggctacccgggccctgctaccggcagcaacgcgtctccacgacactgtcgcaaaataacaacagcaactttgcttggaccggtgccaccaagtatcatctgaatggcagagactctctggtaaatcccggtgtcgctatggcaacgcacaaggacgacgaagagcgattttttccatccagcggagtcttgatgtttgggaaacagggagctggaaaagacaacgtggactatagcagcgttatgctaaccagtgaggaagaaatcaaaaccaccaacccagtggccacagaacagtacggcgtggtggccgataacctgcaacagcaaaacgccgctcctattgtaggggccgtcaacagtcaaggagccttacctggcatggtctggcagaaccgggacgtgtacctgcagggtcctatctgggccaagattcctcacacggacggcaactttcatccttcgccgctgatgggaggctttggactgaaacacccgcctcctcagatcctgattaagaatacacctgttcccgcggatcctccaactaccttcagtcaagccaagctggcgtcgttcatcacgcagtacagcaccggacaggtcagcgtggaaattgaatgggagctgcagaaagagaacagcaagcgctggaacccagagattcagtatacttccaactactacaaatctacaaatgtggactttgctgtcaatactgagggtacttattcagagcctcgccccattggcacccgttacctcacccgtaacctgtaattgcctgttaatcaataaaccggttaattcgtttcagttgaactttggtctctgcgaagggcgaattc

SEQ ID NO: 419 - protein, 738 aa, Adeno-associated virus; identical to SEQ ID NO: 407

SEQ ID NO: 420 - DNA, 1933 bp, Adeno-associated virus
  misc_feature (1302)..(1302): n is a, c, t, or g
caaggcctacgaccagcagctcaaagcgggtgacaatccgtacctgcggtataaccacgccgacgccgagtttcaggagcgtcttcaagaagatacgtcttttgggggcaacctcgggcgagcagtcttccaggccaaaaagcgggttctcgaacctcttggtctggttgagacgccagctaagacggcacctggaaagaagcgaccggtagactcgccagactccacctcgggcatcggcaagaaaggccagcagcccgcgaaaaagagactcaactttgggcagactggcgactcagagtcagtccccgaccctcaaccaatcggagaaccaccagcaggcccctctggtctgggatctggtacaatggctgcaggcggtggcgcaccaatggctgacaataacgagggcgccgacggagtgggtaatgcctcaggaaattggcattgcgattccacatggctgggcgacagagtcatcaccaccagcacccgaacctgggccctgcccacctacaacaaccacctctacaagcaaatctccagtcagtcagcagggagcaccaacgataacgtctatttcggctacagcaccccctgggggtattttgacttcaacagattccattgccacttctcaccacgtgactggcagcgacttatcaacaacaactggggattccggcccaagaagctcaacttcaagctcttcaacatccaggtcaaggaggtcacgacgaatgacggtgtcacaaccatcgctaataaccttaccagcacggttcaggtcttttcggactcggaatatcaactgccgtacgtcctcggctccgcgcaccagggctgcctgcctccgttcccggcagacgtgttcatgattccgcagtacggatacctgactctgaacaatggcagccaatcggtaggccgttcctccttctactgcctggagtactttccttctcagatgctgagaacgggcaacaacttcacctttagctacaccttcgaggacgtgcctttccacagcagctacgcgcacagccagagtctggaccggctgatgaatcccctcatcgaccagtacctgtactacttggccagaacacagagcaacgcaggaggtactgctggcaatcgggaactgcagttttatcagggcggacctaccaccatggccgaacaagcaaagaactggctgcccggaccttgcttccggcaacagagagtatccaagacgctggatcaaaataacaacagcaactttgcctggactggtgccacaaaataccatttaaatgnaagaaattcattggttaatcccggtgtcgccatggcaacccacaaggacgacgaggaacgcttcttcccttcgagcggagttctaatttttggcaaaactggagcagctaataaaactacattagaaaacgtgctcatgacaaatgaagaagaaattcgtcctaccaacccggtagctaccgaggaatacgggattgtaagcagcaacttgcaggcggctagcaccgcagcccagacacaagttgttaacaaccagggagccttacctggcatggtctggcagaaccgggacgtgtacctgcaaggtcccatttgggccaagattcctcacacggacggcaactttcacccgtctcctctaatgggtggctttggactgaaacacccgcctccccagatcctgatcaaaaacacaccggtacctgctaatcctccagaagtgtttactcctgccaagtttgcttccttcatcacgcagtacagcaccgggcaagtcagcgttgagatcgagtgggagctgcagaaagagaacagcaagcgctggaacccagagattcagtacacctccaactttgacaaacagactggagtggactttgctgttgacagccagggtgtttactctgagcct

SEQ ID NO: 421 - protein, 733 aa, Artificial Sequence
  Description of Artificial Sequence: Synthetic polypeptide
MAADGYLPDWLEDNLSEGIREWWDLKPGAPKPKANQQKQDDGRGLVLPGYKYLGPFNGLDKGEPVNAADAAALEHDKAYDQQLKAGDNPYLRYNHADAEFQERLQEDTSFGGNLGRAVFQAKKRVLEPLGLVEEGAKTAPGKKRPLESPQEPDSSSGIGKKGKQPAKKRLNFEEDTGAGDGPPEGSDTSAMSSDIEMRAAPGGNAVDAGQGSDGVGNASGDWHCDSTWSEGKVTTTSTRTWVLPTYNNHLYLRLGTTSNSNTYNGFSTPWGYFDFNRFHCHFSPRDWQRLINNNWGLRPKAMRVKIFNIQVKEVTTSNGETTVANNLTSTVQIFADSSYELPYVMDAGQEGSLSPFPNDVFMVPQYGYCGIVTGENQNQTDRNAFYCLEYFPSQMLRTGNNFEMAYNFGKVPFHSMYAYSQSPDRLMNPLLDQYLWHLQSTTSGETLNQGNAATTFGKIRSGDFAFYRKNWLPGPCVKQQRLSKTASQNYKIPASGGNALLKYDTHYTLNNRWSNIAPGPPMATAGPSDGDFSNAQLIFPGPSVTGNTTTSANNLLFTSEEEIAATNPRDTDMFGQIADNNQNATTAPITGNVTAMGVLPGMVWQNRDIYYQGPIWAKIPHADGHFHPSPLIGGFGLKHPPPQIFIKNTPVPANPATTFTAARVDSFITQYSTGQVAVQIEWEIEKERSKRWNPEVQFTSNYGNQSSMLWAPDTTGKYTEPRVIGSRYLTNHL

SEQ ID NO: 422 - DNA, 3105 bp, Adeno-associated virus
gaattcgcccttgctgcgtcaactggaccaatgagaactttcccttcaacgattgcgtcgacaagatggtgatctggtgggaggagggcaagatgaccgccaaggtcgtggagtccgccaaggccattctgggcggaagcaaggtgcgcgtggaccaaaagtgcaagtcatcggcccagatcgaccccacgcccgtgatcgtcacctccaacaccaacatgtgcgccgtgatcgacgggaacagcaccaccttcgagcaccagcagccgctgcaggaccgcatgttcaagttcgagctcacccgccgtctggagcacgactttggcaaggtgaccaagcaggaagtcaaagagttcttccgctgggctcaggatcacgtgactgaggtggcgcatgagttctacgtcagaaagggcggagccaccaaaagacccgcccccagtgacgcggatataagcgagcccaagcgggcctgcccctcagttgcggagccatcgacgtcagacgcggaagcaccggtggactttgcggacaggtaccaaaacaaatgttctcgtcacgcgggcatgcttcagatgctgtttccctgcaagacatgcgagagaatgaatcagaatttcaacgtctgcttcacgcacggggtcagagactgctcagagtgcttccccggcgcgtcagaatctcaacccgtcgtcagaaaaaagacgtatcagaaactgtgcgcgattcatcatctgctggggcgggcacccgagattgcgtgttcggcccgcgatctcgtcaacgtggacttggatgactgtgtttctgagcaataaatgacttaaaccaggtatggctgctgacggttatcttccagattggctcgaggacaacctctctgagggcattcgcgagtggtgggacctgaaacctggagcccccaagcccaaggccaaccagcagaagcaggacgacggccggggtctggtgcttcctggctacaagtacctcggacccttcaacggactcgacaagggggagcccgtcaacgcggcggacgcagcggccctcgagcacgacaaggcctacgaccagcagctcaaagcgggtgacaatccgtacctgcggtataaccacgccgacgccgagtttcaggagcgtctgcaagaagatacgtcttttgggggcaacctcgggcgagcagtcttccaggccaagaagagggtactcgaacctctgggcctggttgaagaaggtgctaagacggctcctggaaagaagagaccgttagagtcaccacaagagcccgactcctcctcaggaatcggcaaaaaaggcaaacaaccagccaaaaagagactcaactttgaagaggacactggagccggagacggaccccctgaaggatcagataccagcgccatgtcttcagacattgaaatgcgtgcagcaccgggcggaaatgctgtcgatgcgggacaaggttccgatggagtgggtaatgcctcgggtgattggcattgcgattccacctggtctgagggcaaggtcacaacaacctcgaccagaacctgggtcttgcccacctacaacaaccacttgtacctgcggctcggaacaacatcaaacagcaacacctacaacggattctccaccccctggggatactttgactttaacagattccactgtcacttctcaccacgtgactggcaaagactcatcaacaacaactggggactacgaccaaaagccatgcgcgttaaaatcttcaatatccaagttaaggaggtcacaacgtcgaacggcgagactacggtcgctaataaccttaccagcacggttcagatatttgcggactcgtcgtatgagctcccgtacgtgatggacgctggacaagagggaagtctgtctcctttccccaatgacgtcttcatggtgcctcaatatggctactgtggcattgtgactggcgaaaatcagaaccagacggacagaaatgctttctactgcctggagtattttccttcacaaatgctgagaactggcaataactttgaaatggcttacaactttgggaaggtgccgttccactcaatgtatgcttacagccagagcccggacagactgatgaatcccctcctggaccagtacctgtggcacttacagtcgaccacctctggagagactctgaatcaaggcaatgcagcaaccacatttggaaaaatcaggagtggagactttgccttttacagaaagaactggctgcctgggccttgtgttaaacagcagagactctcaaaaactgccagtcaaaattacaagattcctgccagcgggggcaacgctctgttaaagtatgacacccactataccttaaacaaccgctggagcaacatagcgcctggacctccaatggcaacagctggaccttcagatggggacttcagcaacgcccagctcatcttccctggaccatcagtcaccggaaacacaacaacctcagcaaacaatctgttgtttacatcagaagaagaaattgctgccaccaacccaagagacacggacatgtttggtcagattgctgacaataatcagaatgctacaactgctcccataaccggcaacgtgactgctatgggagtgcttcctggcatggtgtggcaaaacagagacatttactaccaagggccaatttgggccaagatcccacacgcggacggacattttcatccttcaccgctaattggcggttttggactgaaacatccgcctccccagatatttatcaaaaacacccccgtacctgccaatcctgcgacaaccttcactgcagccagagtggactctttcatcacacaatacagcaccggccaggtcgctgttcagattgaatgggaaatcgaaaaggaacgctccaaacgctggaatcctgaagtgcagtttacttcaaactatgggaaccagtcttctatgttgtgggctcccgatacaactgggaagtatacagagccgcgggttattggctctcgttatttgactaatcatttgtaactgcctagttaatcaataaaccgtgtgattcgtttcagttgaactttggtctctgcgaagggcgaattc

SEQ ID NO: 423 - protein, 733 aa, Adeno-associated virus
MAADGYLPDWLEDNLSEGIREWWDLKPGAPKPKANQQKQDDGRGLVLPGYKYLGPFNGLDKGEPVNAADAAALEHDKAYDQQLKAGDNPYLRYNHADAEFQERLQEDTSFGGNLGRAVFQAKKRVLEPLGLVEEGAKTAPGKKRPLESPQEPDSSSGIGKKGKQPAKKRLNFEEDTGAGDGPPEGSDTSAMSSDIEMRAAPGGNAVDAGQGSDGVGNASGDWHCDSTWSEGKVTTTSTRTWVLPTYNNHLYLRLGTTSNSNTYNGFSTPWGYFDFNRFHCHFSPRDWQRLINNNWGLRPKAMRVKIFNIQVKEVTTSNGETTVANNLTSTVQIFADSSYELPYVMDAGQEGSLPPFPNDVFMVPQYGYCGIVTGENQNQTDRNAFYCLEYFPSQMLRTGNNFEMAYNFEKVPFHSMYAHSQSLDRLMNPLLDQYLWHLQSTTSGETLNQGNAATTFGKIRSGDFAFYRKNWLPGPCVKQQRFSKTASQNYKIPASGGNALLKYDTHYTLNNRWSNIAPGPPMATAGPSDGDFSNAQLIFPGPSVTGNTTTSANNLLFTSEEEIAATNPRDTDMFGQIADNNQNATTAPITGNVTAMGVLPGMVWQNRDIYYQGPIWAKIPHADGHFHPSPLIGGFGLKHPPPQIFIKNTPVPANPATTFTAARVDSFITQYSTGQVAVQIEWEIEKERSKRWNPEVQFTSNYGNQSSMLWAPDTTGKYTEPRVIGSRYLTNHL

SEQ ID NO: 424 - DNA, 3105 bp, Adeno-associated virus
gaattcgcccttgctgcgtcaactggaccaatgagaactttcccttcaacgattgcgtcgacaagatggtgatctggtgggaggagggcaagatgaccgccaaggtcgtggagtccgccaaggccattctgggcggaagcaaggtgcgcgtggaccaaaagtgcaagtcatcggcccagatcgaccccacgcccgtgatcgtcacctccaacaccaacatgtgcgccgtgatcgacgggaacagcaccaccttcgagcaccagcagccgctgcaggaccgcatgttcaagttcgagctcacccgccgtctggagcacgactttggcaaggtgaccaagcaggaagtcaaagagttcttccgctgggctcaggatcacgtgactgaggtggcgcatgagttctacgtcagaaagggcggagccaccaaaagacccgcccccagtgacgcggatataagcgagcccaagcgggcctgcccctcagttgcggagccatcgacgtcagacgcggaagcaccggtggactttgcggacaggtaccaaaacaaatgttctcgtcacgcgggcatgcttcagatgctgtttccctgcaagacatgcgagagaatgaatcagaatttcaacgtctgcttcacgcacggggtcagagactgctcagagtgcttccccggcgcgtcagaatctcaacccgtcgtcagaaaaaagacgtatcagaaactgtgcgcgattcatcatctgctggggcgggcacccgagattgcgtgttcggcctgcgatctcgtcaacgtggacttggatgactgtgtttctgagcaataaatgacttaaaccaggtatggctgctgacggttatcttccagattggctcgaggacaacctctctgagggcattcgcgagtggtgggacctgaaacctggagcccccaagctcaaggccaaccagcagaagcaggacgacggccggggtctggtgcttcctggctacaagtacctcggacccttccacggactcgacaagggggagcccgtcaacgcggcggacgcagcggccctcgagcacgacaaggcctacgaccagcagctcaaagcgggtgacaatccgtacctgcggtataaccacgccgacgccgagtttcaggagcgtctgcaagaagatacgtcttttgggggcaacctcgggcgagcagtcttccaggccaagaagagggtactcgaaccactgggcctggttgaagaaggtgctaagacggctcctggaaagaagagaccgttagagtcaccacaagagcccgactcctcctcaggaatcggcaaaaaaggcaaacaaccagccaaaaagagactcaactttgaagaggacactggagccggagacggaccccctgaaggatcagataccagcgccatgtcttcagacattgaaatgcgtgcagcaccgggcggaaatgctgtcgatgcgggacaaggttccgatggagtgggtaatgcctcgggtgattggcattgcgattccacctggtctgagggcaaggtcacaacaacctcgaccagaacctgggtcttgcccacctacaacaaccacttgtacctgcggctcggaacaacatcaaacagcaacacctacaacggattctccaccccctggggatactttgactttaacagattccactgtcacttctcaccacgtgactggcaaagactcatcaacaacaactggggactacgaccaaaagccatgcgcgttaaaatcttcaatatccaagttaaggaggtcacaacgtcgaacggcgagactacggtcgctaataaccttaccagcacggttcagatatttgcggactcgtcgtatgagctcccgtacgtgatggacgctggacaagagggaagtctgcctcctttccccaatgacgtcttcatggtgcctcaatatggctactgtggcattgtgactggcgaaaatcagaaccagacggacagaaatgctttctactgcctggagtattttccttcacaaatgctgagaactggcaataactttgaaatggcttacaactttgagaaggtgccgttccactcaatgtatgctcacagccagagcctggacagactgatgaatcccctcctggaccagtacctgtggcacttacagtcgaccacctctggagagactctgaatcaaggcaatgcagcaaccacatttggaaaaatcaggagtggagactttgccttttacagaaagaactggctgcctgggccttgtgttaaacagcagagattctcaaaaactgccagtcaaaattacaagattcctgccagcgggggcaacgctctgttaaagtatgacacccactataccttaaacaaccgctggagcaacatagcgcctggacctccaatggcaacagctggaccttcagatggggacttcagcaacgcccagctcatcttccctggaccatcagtcaccggaaacacaacaacctcagcaaacaatctgttgtttacatcagaaggagaaattgctgccaccaacccaagagacacggacatgtttggtcagattgctgacaataatcagaatgctacaactgctcccataaccggcaacgtgactgctatgggagtgcttcctggcatggtgtggcaaaacagagacatttactaccaagggccaatttgggccaagatcccacacgcggacggacattttcatccttcaccgctaattggcggttttggactgaaacatccgcctccccagatatttatcaaaaacacccccgtacctgccaatcctgcgacaaccttcactgcagccagagtggactctttcatcacacaatacagcaccggccaggtcgctgttcagattgaatgggaaatcgaaaaggaacgctccaaacgccggaatcctgaagtgcagtttacttcaaactatgggaaccagtcttctatgttgtgggctcccgatacaactgggaagtatacagagccgcgggttattggctctcgttatttgactaatcatttgtaactgcctagttaatcaataaaccgtgtgattcgtttcagttgaactttggtctctgcgaagggcgaattc

SEQ ID NO: 425 - protein, 733 aa, Artificial Sequence
  Description of Artificial Sequence: Synthetic polypeptide
MAADGYLPDWLEDNLSEGIREWWDLKPGAPKPKANQQKQDDGRGLVLPGYEYLGPFNGLDKGEPVNAADAAALEHDKAYDQQLKAGDNPYLRYNHADAEFQERLQEDTSFGGNLGRAVFQAKKRVLEPLGLVEEGAKTAPGKKRPLESPQEPDSSSGIGKKGKQPAKKRLNFEEDTGAGDGPPEGSDTSAMSSDIEMRAAPGGNAVDAGQGSDGVGNASGDWHCDSTWSEGKVTTTSTRTWVLPTYNNHLYLRLGTTSNSNTYNGFSTPWGYFDFNRFHCHFSPRDWQRLINNNWGLRPKAMRVKIFNIQVKEVTTSNGETTVANNLTSTVQIFADSSYELPYVMDAGQEGSLPPFPNDVFMVPQYGYCGIVTGENQNQTDRNAFYCLEYFPSQMLRTGNNFETAYNFEKVPFHSMYAHSQSLDGLMNPLLDQYLWHLQSTTSGETLNQGNAATTFGKIRSGDFAFYRKNWLPGPCVKQQRFSKTASQNYKIPASGGNALLKYDTHYTLNNRWSNIAPGPPMATAGPSDGDFSNAQLIFPGPSVTGNTTTSANNLLFTSEEEIAATNPRDTDMFGQIADNNQNATTAPITGNVTAMGVLPGMVWQNRDIYYQGPIWAKIPHADGHFHPSPLIGGFGLKHPPPQIFIKNTPVPAYPATTFTAARVDSFITQYSTGQVAVQIEWEIEKERSKRWNPEVQFTSNCGNQSSMLWAPDTTGKYTEPRVIGSRYLTNHL

SEQ ID NO: 426 - DNA, 3105 bp, Adeno-associated virus
gaattcgcccttcgcagagaccaaagttcaactgaaacgaatcacacggtttattgattaactaggcagttacaaatgattagtcaaataacgagagccaataacccgcggctctgtatacttcccagttgtatcgggagcccacaacatagaagactggttcccacagtttgaagtaaactgcacttcaggattccagcgtttggagcgttccttttcgatttcccattcaatctgaacagcgacctggccggtgctgtattgtgtgatgaaagagtccactctggctgcagtgaaggttgtcgcaggataggcaggtacgggggtgtttttgataaatatctggggaggcggatgtttcagtccaaaaccgccaattagcggtgaaggatgaaaatgtccgtccgcgtgtgggatcttggcccaaattggcccttggtagtaaatgtctctgttttgccacaccatgccaggaagcactcccatagcagtcacgttgccggttatgggagcagttgtagcattctgattattgtcagcaatctgaccaaacatgtccgtgtctcttgggttggtggcagcaatttcttcttctgatgtaaacaacagattgtttgctgaggttgttgtgtttccggtgactgatggtccagggaagatgagctgggcgttgctgaagtccccatctgaaggtccagctgttgccattggaggtccaggcgctatgttgctccagcggttgtttaaggtatagtgggtgtcatactttaacagagcgttgcccccgctggcaggaatcttgtaattttgactggcagtttttgagaatctctgctgtttaacacaaggcccaggcagccagttctttctgtaaaaggcaaagtctccactcctgatttttccaaatgtggttgctgcattgccttgattcagagtctctccagaggtggtcgactgtaagtgccacaggtactggtccaggaggggattcatcagtccgtccaggctctggctgtgagcatacattgagtggaacggcaccttctcaaagttgtaagccgtttcaaagttattgccagttctcagcatttgtgaaggaaaatactccaggcagtagaaagcatttctgtccgtctggttctgattttcgccagtcacaatgccacagtagccatattgaggcaccatgaagacgtcattggggaaaggaggcagacttccctcttgtccagcgtccatcacgtacgggagctcatacgacgagtccgcaaatatctgaaccgtgctggtaaggttattagcgaccgtagtctcgccgttcgacgttgtgacctccttaacttggatattgaagattttaacgcgcatggcttttggtcgtagtccccagttgttgttgatgagtctttgccagtcacgtggtgagaagtgacagtggaatctgttaaagtcaaagtatccccagggggtggagaatccgttgtaggtgttgctgtttgatgttgttccgagccgcaggtacaagtggttgttgtaggtgggcaagacccaggttctggtcgaggttgttgtgaccttgccctcagaccaggtggaatcgcaatgccaatcacccgaggcattacccactccatcggaaccttgtcccgcatcgacagcatttccgcccggtgctgcacgcatttcaatgtctgaagacatggcgctggtatctgatccttcagggggtccgtctccggctccagtgtcctcttcaaagttgagtctctttttggctggttgtttgccttttttgccgattcctgaggaggagtcgggctcttgtggtgactctaacggtctcttctttccaggagccgtcttagcaccttcttcaaccaggcccagaggttcgagtaccctcttcttggcctggaagactgctcgcccgaggttgcccccaaaagacgtatcttcttgcagacgctcctgaaactcggcgtcggcgtggttataccgcaggtacggattgtcacccgctttgagctgctggtcgtaggccttgtcgtgctcgagggccgctgcgtccgccgcgttgacgggctcccccttgtcgagtccgttgaagggtccgaggtactcgtagccaggaagcaccagaccccggccgtcgtcctgcttctgctggttggccttgggcttgggggctccaggtttcaggtcccaccactcgcgaatgccctcagagaggttgtcctcgagccaatctggaagataaccgtcagcagccatacctggtttaagtcatttattgctcagaaacacagtcatccaagtccacgttgacgagatcgcaggccgaacacgcaatctcgggtgcccgccccagcagatgatgaatcgcgcacagtttctgatacgtcttttttctgacgacgggttgagattctgacgcgccggggaagcactctgagcagtctctgaccccgtgcgtgaagcagacgttgaaattctgattcattctctcgcatgtcttgcagggaaacagcatctgaagcatgcccgcgtgacgagaacatttgttttggtacctgtccgcaaggtccaccggtgcttccgcgtctgacgtcgatggctccgcaactgaggggcaggcccgcttgggctcgcttatatccgcgtcactgggggcgggtcttttggtggctccgccctttctgacgtagaactcatgcgccacctcagtcacgtgatcctgagcccagcggaagaactctttgacttcctgcttggtcaccttgccaaagtcgtgctccagacggcgggtgagctcgaacttgaacatgcggtcctgcagcggctgctggtgctcgaaggtggtgctgttcccgtcgatcacggcgcacatgttggtgttggaggtgacgatcacgggcgtggggtcgatctgggccgatgacttgcacttttggtccacgcgcaccttgcttccgcccagaatggccttggcggactccacgaccttggcggtcatcttgccctcctcccaccagatcaccatcttgtcgacgcaatcgttgaagggaaagttctcattggtccagttgacgcagcaagggcgaattc

SEQ ID NO: 427 - protein, 729 aa, Artificial Sequence
  Description of Artificial Sequence: Synthetic polypeptide
MAADGYLPDWLEDNLSEGIREWWDLKPGAPKPKANQQKQDDGRGLVLPGYKYLGPFNGLDKGEPVNAADAAALEHDKAYDQQLKAGDNPYLRYNHADAEFQERLQEDTSFGGNLGRAVFQAKKRVLEPLGLVEEGAKTAPGKKRPIDSPDSSTGIGKKGQQPAKKKLNFGQTGDSESVPDPQPLGEPPAAPSSVGSGTMAAGGGAPMADNNEGADGVGNASGNWHCDSTWLGDRVITTSTRTWALPTYNNHLYKQISSSSSGATNDNHYFGYSTPWGYFDFNRFHCHFSPRDWQRLINNNWGFRPKKLRFKLFNIQVKEVTTNDGVTTIANNLTSTVQVFSDSEYQLPYVLGSAHQGCLPPFPADVFMIPQYGYLTLNNGSQSVGRSSFYCLEYFPSQMLRTGNNFEFSYSFEDVPFHSSYAHSQSLDRLMNPLIDQYLYYLARTQSTTGSTRELQFHQAGPNTMAEQSKNWLPGPCYRQQGLSKNLDFNNNSNFAWTAATKYHLNGRNSLTNPGIPMATNKDDEDQFFPINGVLVFGKTGAANKTTLENVLMTSEEEIKTTNPVATEEYGVVSSNLQPSTAGPQSQTINSQGALPGMVWQNRDVYLQGPIWAKIPHTDGNFHPSPLMGGFGLKHPPPQILIKNTPVPANPPEVFTPAKFASFITQYSTGQVSVEIEWELQKENSKRWNPEIQYTSNYAKSNNVEFAVNPDGVYTEPRPIGTRYLPRNL

SEQ ID NO: 428 - DNA, 3094 bp, Adeno-associated virus
gaattcgcccttgctgcgtcaactggaccaagagaactttcccttcaacgattgcgtcgacaagatggtgatctggtgggaggagggcaagatgacggccaaggtcgtggagtccgccaaagccattctgggcggaagcaaggtgcgcgtcgaccaaaagtgcaagtcctcggcccagatcgatcccacccccgtgatcgtcacctccaacaccaacatgtgcgccgtgatcgacgggaacagcaccaccttcgagcaccagcagccgttgcaggaccggatgttcaaatttgaactcacccgccgtctggaacacgactttggcaaggtgaccaagcaggaagtcaaagagttcttccgctgggctagtgatcacgtgactgaggtgacgcatgagttctacgtcagaaagggcggagccagcaaaagacccgcccccgatgacgcggatataagcgagcccaagcgggcctgtccctcagtcacggacccatcgacgtcagacgcggaaggagctccggtggactttgccgacaggtaccaaaacaaatgttctcgtcacgcgggcatgcttcagatgctgtttccctgcaaaacgtgcgagagaatgaatcagaatttcaacatttgcttcacgcacggggtcagagactgtttagaatgtttccccggcgtgtcagaatctcaaccggtcgtcagaaaaaagacgtatcggaagctgtgtgcgattcatcatctgctggggcgggcacccgagattgcttgctcggcctgcgacctggtcaacgtggacctggacgactgtgtttctgagcaataaatgacttaaaccgggtatggctgccgatggttatcttccagattggctcgaggacaacctctctgagggcattcgcgagtggtgggacctgaaacctggagccccgaaacccaaagccaaccagcaaaagcaggacgacggccggggtctggtgcttcctggctacaagtacctcggacccttcaacggactcgacaagggggagcccgtcaacgcggcggacgcagcggccctcgagcacgacaaggcctacgaccagcagctcaaagcgggtgacaatccgtacctgcggtataaccacgccgacgccgagtttcaggagcgtctgcaagaagatacgtcatttgggggcaacctcgggcgagcagtcttccaggccaagaagcgggttctcgaacctctcggtctggttgaggaaggcgctaagacggctcctggaaagaagagacccatagactctccagactcctccacgggcatcggcaaaaaaggccagcagcccgctaaaaagaagctcaattttggtcagactggcgactcagagtcagtccccgaccctcaacctcttggagaacctccagcagcgccctctagtgtgggatctggtacaatggctgcaggcggtggcgcaccaatggcagacaataacgaaggtgccgacggagtgggtaatgcctcaggaaattggcattgcgattccacatggctgggcgacagagtcatcaccaccagcaccagaacctgggccctccccacctacaacaaccacctctacaagcaaatctccagcagcagctcaggagccaccaatgacaaccactacttcggctacagcaccccctgggggtattttgactttaacagattccactgccacttctcaccacgtgactggcagcgactcatcaacaacaactggggattccggcccaagaagctgcggttcaagctcttcaacatccaggtcaaggaggtcacaacgaatgacggcgtcacgaccatcgctaataaccttaccagcacggttcaggtcttctcggactcggaataccagctgccgtacgtcctcggctctgcgcaccagggctgcctgcctccgttcccggcggacgtcttcatgattcctcagtacggctacctgactctgaacaacggcagccaatcggtgggccgttcctccttctactgcctggaatatttcccctctcaaatgctgagaacgggcaacaactttgagttcagttacagcttcgaggacgtgcctttccacagcagctacgcgcacagccagagcctagaccggctgatgaaccctctcatcgaccagtacctgtactacctggcccggacccagagcaccacgggttccaccagggaactgcaatttcatcaagctgggcccaatactatggccgagcagtcaaagaactggctgcctggaccctgctataggcaacagggactgtcaaagaacttggactttaacaacaacagcaattttgcctggactgctgccactaaatatcatctgaatggcagaaactctttgaccaatcctggcattcccatggcaaccaacaaggatgatgaggaccagttctttcccatcaacggggtactggtttttggcaagacgggagctgccaacaaaactacgctggaaaacgttctgatgaccagcgaggaggagatcaagaccactaaccctgtggctacagaagaatacggtgtggtctccagcaacctgcagccgtctacagccgggcctcaatcacagactatcaacagccagggagcactgcctggcatggtctggcagaaccgggacgtgtatctgcagggtcccatctgggccaaaattcctcacacggatggcaactttcacccgtctcctctgatgggcggttttggactcaaacacccgcctccacagatcctgatcaaaaacacacctgtacctgctaatcctccggaggtgtttactcctgccaagtttgcctccttcatcacgcagtacagcaccggacaagtcagcgtggaaatcgagtgggagctgcagaaagaaaacagcaagcgctggaacccagaaattcagtatacttccaattatgccaagtctaataatgttgaatttgctgtgaaccctgatggtgtttatactgagcctcgccccattggcactcgttacctcccccgtaatctgtaattgcttgttaatcaataaaccggttgattcgtttcagttgaactttggtctctgcgaagggcgaattc

SEQ ID NO: 429 - protein, 1458 aa, Artificial Sequence
  Description of Artificial Sequence: Synthetic polypeptide
MAADGYLPDWLEDNLSEGIREWWDLKPGAPKPKANQQKQDDGRGLVLPGYKYLGPFNGLDKGEPVNAADAAALEHDKAYDQQLKAGDNPYLRYNHADAEFQERLQEDTSFGGNLGRAVFQAKKRVLEPLGLVEEGAKTAPGKKRPIDSPDSSTGIGKKGQQPAKKKLNFGQTGDSESVPDPQPLGEPPAAPSSVGSGTMAAGGGAPTADNNEGADGVGNASGNWHCDSTWLGDRVITTSTRTWALPTYNNHLYKQISSSSSGATNDNHYFGYSTPWGYFDFNRFHCHFSPRDWQRLINNNWGFRPKKLRFKLFNIQVKEVTTNDGVTTIANNLTSTVQVFSDSEYQLPYVLGSAHQGCLPPFPADVFMIPQYGYLTLNNGSQSVGRSSFYCLEYFPSQMLRTGNNFEFSYSFEDVPFHSSYAHSQSLDRLMNPLIDQYLYYLARTQSTTGSTRELQFHQAGPNTMAEQSKNWLPGPCYRQQRLSKNLDFNNNSNFAWTAATKYHLNGRNSLTNPGIPMATNKDDEDQFFPINGVLVFGKTGAANKTTLENVLMTSEEEIKTTNPVATEEYGVVSSNLQSSTAGPQSQTINSQGALPGMVWQNRDVYLQGPIWAKIPHTDGNFHPSPLMGGFGLEHPPPQILIKNTPVPANPPEVFTPAKFASFITQYSTGQVSVEIEWELQKENSKRWNPEIQYTSNYAKSNNVEFAVNPDGVYTEPRPIGTRYLTRNLMAADGYLPDWLEDNLSEGIREWWDLKPGAPKPKANQQKQDDGRGLVLPGYKYLGPFNGLDKGEPVNAADAAALEHDKAYDQQLKAGDNPYLRYNHADAEFQERLQEDTSFGGNLGRAVFQAKKRVLEPLGLVEEGAKTAPGKKRPIGSPDSSTGIGKKGQQPAKKKLNFGQTGDSESVPDPQPLGEPPAAPSSVGSGTMAAGGGAPMADNNEGADGVGNASGNWHCDSTWLGDRVITTSTRTWALPTYNNHLYKQISSSSSGATNDNHYFGYSTPWGYFDFNRFHCHFSPRDWQRLINNNWGFRPKKLRFKLLNIQVKEVTTNDGVTTIANNLTSTVQVFSDSEYQLPYVLGSAHQGCLPPFPADVFMIPQYGYLTLDNGSQSVGRSSFYCLEYFPSQMLRTGNNFEFSYSFEDVPFHSSYAHSQSLDRLMNPLIDQYLYYLARTQSTTGSTRELQFHQAGPNTMAEQSKNWLPGPCYRQQRLSKNLDFNNNSNFAWTAATKYHLNGRNSLTNPGIPMATNKDDEDQFFPINGVLVFGKTGAANKTTLENVLMTSEEEIKTTNPVATEEYGVVSSNLQSSTAGPQSQTINSQGALPGMVWQNRDVYLQGPIWAKIPHTDGNFHPSPLMGGFGLKHPPPQILIKNTPVPANPPEVFTPAKFASFITQYSTGQVSVEIEWELQKENSKRWNPEIQYTSNYAKSNNVEFAVNPDGVYTEPRPIGTRYLTRNL

SEQ ID NO: 430 - DNA, 3095 bp, Adeno-associated virus
gaattcgcccttcgcagagaccaaagttcaactgaaacgaatcaaccggtttattgattaacaagcaattacagattacgggtgaggtaacgagtgccaatggggcgaggctcagtataaacaccatcagggttcacagcaaattcaacattattagacttggcataattggaagtatactgaatttctgggttccagcgcttgctgttttctttctgcagctcccactcgatttccacgctgacttgtccggtgctgtactgcgtgatgaaggaggcaaacttggcaggagtaaacacctccggaggattagcaggtacaggtgtgtttttgatcaggatctgtggaggcgggtgtttgagtccaaaaccgcccatcagaggagacgggtgaaagttgccatccgtgtgaggaattttggcccagatgggaccctgcagatacacgtcccggttctgccagaccatgccaggcagtgctccctggctgttgatagtctgtgattgaggcccggctgtagacgactgcaggttgctggagaccacaccgtattcttctgtagccacagggttagtggtcttgatctcctcctcgctggtcatcagaacgttttccagcgtagttttgttggcagctcccgtcttgccaaaaaccagtaccccgttgatgggaaagaactggtcctcatcatccttgttggttgccatgggaatgccaggattggtcaaagagtttctgccattcagatgatatttagtggcagcagtccaggcaaaattgctgttgttgttaaagtccaagttctttgacagtctctgttgcctatagcagggtccaggcagccagttctttgactgctcggccatagtattgggcccagcttgatgaaattgcagttccctggtggaacccgtggtgctctgggtccgggccaggtagtacaggtactggtcgatgagagggttcatcagccggtctaggctctggctgtgcgcgtagctgctgtggaaaggcacgtcctcgaagctgtaactgaactcaaagttgttgcccgttctcagcatttgagaggggaaatattccaggcagtagaaggaggaacggcccaccgattggctgccgttgtccagagtcaggtagccgtactgaggaatcatgaagacgtccgccgggaacggaggcaggcagccctggtgcgcagagccgaggacgtacggcagctggtattccgagtccgagaagacctgaaccgtgctggtaaggttattagcgatggtcgtgacgccgtcattcgttgtgacctccttgacctggatgttgaggagcttgaaccgcagcttcttgggccggaatccccagttgttgttgatgagtcgctgccagtcacgtggtgagaagtggcagtggaatctgttaaagtcaaaatacccccagggggtgctgtagccgaagtagtggttgtcattggtggctcctgagctgctgctggagatttgcttgtagaggtggttgttgtaggtggggagggcccaggttctggtgctggtggtgatgactctgtcgcccagccatgtggaatcgcaatgccaatttcctgaggcattacccactccgtcggcaccttcgttattgtctgccattggtgcgccaccgcctgcagccattgtaccagatcccacactagagggcgctgctggaggttctccaagaggttgagggtcggggactgactctgagtcgccagtctgaccaaaattgagcttctttttagcgggctgctggccttttttgccgatgcccgtggaggagtctggagagcctatgggtctcttctttccaggagccgtcttagcgccttcctcaaccagaccgagaggttcgagaacccgcttcttggcctggaagactgctcgcccgaggttgcccccaaatgacgtatcttcttgcagacgctcctgaaactcggcgtcggcgtggttataccgcaggtacggattgtcacccgctttgagctgctggtcgtaggccttgtcgtgctcgagggccgctgcgtccgccgcgttgacgggctcccccttgtcgagtccgttgaagggtccgaggtacttgtagccaggaagcaccagaccccggccgtcgtcctgcttttgctggttggctttgggtttcggggctccaggtttcaggtcccaccactcgcgaatgccctcagagaggttgtcctcgagccaatctggaagataaccatcggcagccatacctggtttaagtcatttattgctcagaaacacagtcgtccaggtccacgttgaccaggtcgcaggccgagcaagcaatctcgggtgcccgccccagcagatgatgaatcgcacacagcttccgatacgtcttttttctgacgaccggttgagattctgacacgccggggaaacattctaaacagtctctgaccccgtgcgtgaagcaaatgttgaaattctgattcattctctcgcacgttttgcagggaaacagcacctgaagcatgcccgcgtgacgagaacatttgttttggtacctgtcggcaaagtccaccggagctccttccgcgtctgacgtcgatgggtccgtgactgagggacgggcccgcttgggctcgcttatatccgcgtcatcgggggcgggtcttttgctggctccgccctttctgacgtagaactcatgcgtcacctcagtcacgtgatcactagcccagcggaagaactctttgacttcctgctttgtcaccttgccaaagtcgtgttccagacggcgggtgagttcaaatttgaacatccggtcctgcaacggttgctggtgctcgaaggtggtgctgttcccgtcgatcacggcgcacatgttggtgttggaggtgacgatcacgggggtgggatcgatctgggcggacgacttgcacttttggtccacgcgcaccttgctgccgccgagaatggccttggcggactccacgaccttggccgtcatcttgccctcctcccaccagatcaccatcttgtcgacgcaatcgttgaagggaaagttctcattggtccagttgacgcagcaagggcgaattc

SEQ ID NO: 431 - DNA, 3095 bp, Adeno-associated virus
gaattcgcccttcgcagagaccaaagttcaactgaaacgaatcaaccggtttattgattaacaagcaattacagattacgggtgaggtaacgagtgccaatggggcgaggctcagtataaacaccatcagggttcacagcaaattcaacattattagacttggcataattggaagtatactgaatttctgggttccagcgcttgctgttttctttctgcagctcccactcgatttccacgctgacttgtccggtgctgtactgcgtgatgaaggaggcaaacttggcaggagtaaacacctccggaggattagcaggtacaggtgtgtttttgatcaggatctgtggaggcgggtgttcgagtccaaaaccgcccatcagaggagacgggtgaaagttgccatccgtgtgaggaattttggcccagatgggaccctgcagatacacgtcccggttctgccagaccatgccaggcagtgctccctggctgttgatagtctgtgattgaggcccggctgtagacgactgcaggttgctggagaccacaccgtattcttctgtagccacagggttagtggtcttgatctcctcctcgctggtcatcagaacgttttccagcgtagttttgttggcagctcccgtcttgccaaaaaccagtaccccgttgatgggaaagaactggtcctcatcatccttgttggttgccatgggaatgccaggattggtcaaagagtttctgccattcagatgatatttagtggcagcagtccaggcaaaattgctgttgttgttaaagtccaagttctttgacagtctctgttgcctatagcagggtccaggcagccagttctttgactgctcggccatagtattgggcccagcttgatgaaattgcagttccctggtggaacccgtggtgctctgggtccgggccaggtagtacaggtactggtcgatgagagggttcatcagccggtctaggctctggctgtgcgcgtagctgctgtggaaaggcacgtcctcgaagctgtaactgaactcaaagttgttgcccgttctcagcatttgagaggggaaatattccaggcagtagaaggaggaacggcccaccgattggctgccgttgttcagagtcaggtagccgtactgaggaatcatgaagacgtccgccgggaacggaggcaggcagccctggtgcgcagagccgaggacgtacggcagctggtattccgagtccgagaagacctgaaccgtgctggtaaggttattagcgatggtcgtgacgccgtcattcgttgtgacctccttgacctggatgttgaagagcttgaaccgcagcttcttgggccggaatccccagttgttgttgatgagtcgctgccagtcacgtggtgagaagtggcagtggaatctgttaaagtcaaaatacccccagggggtgctgtagccgaagtagtggttgtcattggtggctcctgagctgctgctggagatttgcttgtagaggtggttgttgtaggtggggagggcccaggttctggtgctggtggtgatgactctgtcgcccagccatgtggaatcgcaatgccaatttcctgaggcattacccactccgtcggcaccttcgttattgtctgccgttggtgcgccaccgcctgcagccattgtaccagatcccacactagagggcgctgctggaggttctccaagaggttgagggtcggggactgactctgagtcgccagtctgaccaaaattgagcttctttttagcgggctgctggccttttttgccgatgcccgtggaggagtctggagagtctatgggtctcttctttccaggagccgtcttagcgccttcctcaaccagaccgagaggttcgagaacccgcttcttggcctggaagactgctcgcccgaggttgcccccaaatgacgtatcttcttgcaggcgctcctgaaactcggcgtcggcgtggttataccgcaggtacggattgtcacccgctttgagctgctggtcgtaggccttgtcgtgctcgagggccgctgcgtccgccgcgttgacgggctcccccttgtcgagtccgttgaagggtccgaggtacttgtagccaggaagcaccagaccccggccgtcgtcctgcttttgctggttggctttgggtttcggggctccaggtttcaggtcccaccactcgcgaatgccctcagagaggttgtcctcgagccaatctggaagataaccatcggcagccatacctggtttaagccatttattgctcagaaacacagtcgtccaggtccacgttgaccaggtcgcaggccgagcaggcaatctcgggtgcccgccccagcagatgatgaatcgcacacagcttccgatacgtcttttttctgacgaccggttgagattctgacacgccggggaaacattctaaacagtctctgaccccgtgcgtgaagcaaatgttgaaattctgattcattctctcgcacgttttgcagggaaacagcatctgaagcatgcccgcgtggcgagaacatttgttttggtacctgtcggcaaagtccaccggagctccttccgcgtctgacgtcgatgggtccgtgactgagggacaggcccgcttgggctcgcttatatccgcgtcatcgggggcgggtcttttgctggctccgccctttctgacgtagaactcatgcgtcacctcagtcacgtgatcactagcccagcggaagaactctttgacttcctgctttgtcaccttgccaaagtcgtgttccagacggcgggtgagttcaaatttgaacatccggtcctgcaacggctgctggtgctcgaaggtggtgctgttcccgtcgatcacggcgcgcatgttggtgttggaggtgacgatcacgggggtgggatcgatctgggcggacgacttgcacttttggtccacgcgcaccttgctgccgccgagaatggccttggcggactccacgaccttggccgtcatcttgccctcctcccaccagatcaccatcttgtcgacgcaatcgttgaagggaaagttctcattggtccagttgacgcagcaagggcgaattc

SEQ ID NO: 432 - protein, 729 aa, Adeno-associated virus; identical to SEQ ID NO: 160

SEQ ID NO: 433 - protein, 729 aa, Adeno-associated virus
MAADGYLPDWLEDNLSEGIREWWDLKPGAPKPKANQQKQDDGRGLVLPGYKYLGPFNGLDKGEPVNAADAAALEHDKAYDQQLKAGDNPYLRYNHADAEFQERLQEDTSFGGNLGRAVFQAKKRVLEPLGLVEEGAKTAPGKKRPIDSPDSSTGIGKKGQQPAKKKLNFGQTGDSESVPDPQPLGEPPAAPSSVGSGTMAAGGGAPTADNNEGADGVGNASGNWHCDSTWLGDRVITTSTRTWALPTYNNHLYKQISSSSSGATNDNHYFGYSTPWGYFDFNRFHCHFSPRDWQRLINNNWGFRPKKLRFKLFNIQVKEVTTNDGVTTIANNLTSTVQVFSDSEYQLPYVLGSAHQGCLPPFPADVFMIPQYGYLTLNNGSQSVGRSSFYCLEYFPSQMLRTGNNFEFSYSFEDVPFHSSYAHSQSLDRLMNPLIDQYLYYLARTQSTTGSTRELQFHQAGPNTMAEQSKNWLPGPCYRQQRLSKNLDFNNNSNFAWTAATKYHLNGRNSLTNPGIPMATNKDDEDQFFPINGVLVFGKTGAANKTTLENVLMTSEEEIKTTNPVATEEYGVVSSNLQSSTAGPQSQTINSQGALPGMVWQNRDVYLQGPIWAKIPHTDGNFHPSPLMGGFGLKHPPPQILIKNTPVPANPPEVFTPAKFASFITQYSTGQVSVEIEWELQKENSKRWNPEIQYTSNYAKSNNVEFAVNPDGVYTEPRPIGTRYLTRNL

SEQ ID NO: 434 - protein, 729 aa, Adeno-associated virus
MAADGYLPDWLEDNLSEGIREWWDLKPGAPKPKANQQKQDDGRGLVLPGYKYLGPFNGLDKGEPVNAADAAALEHDKAYDQQLKAGDNPYLRYNHADAEFQERLQEDTSFGGNLGRAVFQAKKRVLEPLGLVEEGAKTAPGKKRPIDSPDSSTGIGKKGQQPAKKKLNFGQTGDSESVPDPQPLGEPPAAPSSVGSGTMAAGGGAPMADNNEGADGVGNASGNWHCDSTWLGDRVITTSTRTWALPTYNNHLYKQISSSSSGATNDNHYFGYSTPWGYFDFNRFHCHFSPRDWQRLINNNWGFRPKKLRFKLFNIQVKEVTTNDGVTTIANNLTSTVQVFSDSEYQLPYVLGSAHQGCLPPFPADVFMIPQYGYLTLNNGSQSVGRSSFYCLEYFPSQMLRTGNNFEFSYSFEDVPFHSSYAHSQSLDRLMNPLIDQYLYYLARTQSTTGSTRELQFHQAGPNTMAEQSKNWLPGPCYRQQRLSKNLDFNNNSNFAWTAATKYHLNGRNSLTNPGIPMATNKDDEDQFFPINGVLVFGKTGAANKTTLENVLMTSEEEIKTTNPVATEEYGVVSSNLQSSTAGPQSQTINSQGALPGMVWQNRDVYLQGPIWAKIPHTDGNFHPSPLMGGFGLKHPPPQILIKNTPVPANPPEVFTPAKFASFITQYSTGQVSVEIEWELQKENSKRWNPEIQYTSNYAKSNNVEFAVNPDGVYTEPRPIGTRYLTRNL

SEQ ID NO: 435 - DNA, 2217 bp, Adeno-associated virus
atggctgctgacggttatcttccagattggctcgaggacaacctctctgagggcattcgcgagtggtgggacctgaaacctggagcccccaagcccaaggccaaccagcagaagcaggacgacggccggggtctggtgcttcctggctacaagtacctcggacccttcaacggactcgacaagggggagcccgtcaacgcggcggacgcagcggccctcgagcacgacaaggcctacgaccagcagctcaaagcgggtgacaatccgtacctgcggtataaccacgccgacgccgagtttcaggagcgtctacaagaagatacgtcttttgggggcaacctcgggcgagcagtcttccaggccaagaagcgggttctcgaacctctcggtctggttgaggaagctgctaagacggctcctggaaagaagagaccggtagaaccgtcacctcagcgttcccccgactcctccacgggcatcggcaagaaaggccagcggcccgctaaaaagagactgaactttggtcagactggcgactcagagtcagtccccgaccctcaaccaatcggagaaccaccagcaggcccctctggtctgggatctggtacaatggctgcaggcggtggcgctccaatggcagacaataacgaaggcgccgacggagtgggtagttcctcaggaaattggcattgcgattccacatggctgggcgacagagtcatcaccaccagcacccgaacctgggccctgcccacctacaacaaccacctctacaagcaaatatccaatgggacatcgggaggaagcaccaacgacaacacctacttcggctacagcaccccctgggggtattttgacttcaacagattccactgccacttctcaccacgtgactggcagcgactcatcaacaacaactggggattccggccaaaaagactcagcttcaagcccttcaacatccaggtcaaggaggtcacgcagaatgaaggcaccaagaccatcgccaataaccttaccagcacgattcaggtatttacggactcggaataccagctgccgtacgtcctcggctccgcgcaccagggctgcctgcctccgttcccggcggacgtcttcatgattccccagtacggctaccttacactgaacaatggaagtcaagccgtaggccgttcctccttctactgcctggaatattttccatctcaaatgctgcgaactggaaacaattttgaattcagctacaccttcgaggacgtgcctttccacagcagctacgcacacagccagagcttggaccgactgatgaatcctctcatcgaccagtacctgcactacttatccagaactcagtccacaggaggaactcaaggtacccagcaattgttattttctcaagctgggcctgcaaacatgtcggctcaggctaagaactggctacctggaccttgctaccggcagcagcgagtctctacgacactgtcgcaaaacaacaacagcaactttgcttggactggtgccaccaaatatcacctgaacggaagagactctttggtaaatcccggtgtcgccatggcaacccacaaggacgacgaggaacgcttcttcccgtcgagtggagtcctgatgtttggaaaacagggtgctggaagagacaatgtggactacagcagcgttatgctaaccagcgaagaagaaattaaaaccactaaccctgtagccacagaacaatacggtgtggtggctgacaacttgcagcaaaccaatacagggcctattgtgggaaatgtcaacagccaaggagccttacctggcatggtctggcagaaccgagacgtgtacctgcagggtcccatctgggccaagattcctcacacggacggcaacttccacccttcaccgctaatgggaggatttggactgaagcacccacctcctcagatcctgatcaagaacacgccggtacctgcggatcctccaacaacgttcagccaggcgaaattggcttccttcattacgcagtacagcaccggacaggtcagcgtggaaatcgagtgggagctgcagaaggagaacagcaaacgctggaacccagagattcagtacacttcaaactactacaaatctacaaatgtggactttgctgtcaatacagagggaacttattctgagcctcgccccattggtactcgctacctcacccgtaatctgtaa

SEQ ID NO: 436 - protein, 738 aa, Adeno-associated virus
MAADGYLPDWLEDNLSEGIREWWDLKPGAPKPKANQQKQDDGRGLVLPGYKYLGPFNGLDKGEPVNAADAAALEHDKAYDQQLKAGDNPYLRYNHADAEFQERLQEDTSFGGNLGRAVFQAKKRVLEPLGLVEEAAKTAPGKKRPVEPSPQRSPDSSTGIGKKGQRPAKKRLNFGQTGDSESVPDPQPIGEPPAGPSGLGSGTMAAGGGAPMADNNEGADGVGSSSGNWHCDSTWLGDRVITTSTRTWALPTYNNHLYKQISNGTSGGSTNDNTYFGYSTPWGYFDFNRFHCHFSPRDWQRLINNNWGFRPKRLSFKPFNIQVKEVTQNEGTKTIANNLTSTIQVFTDSEYQLPYVLGSAHQGCLPPFPADVFMIPQYGYLTLNNGSQAVGRSSFYCLEYFPSQMLRTGNNFEFSYTFEDVPFHSSYAHSQSLDRLMNPLIDQYLHYLSRTQSTGGTQGTQQLLFSQAGPANMSAQAKNWLPGPCYRQQRVSTTLSQNNNSNFAWTGATKYHLNGRDSLVNPGVAMATHKDDEERFFPSSGVLMFGKQGAGRDNVDYSSVMLTSEEEIKTTNPVATEQYGVVADNLQQTNTGPIVGNVNSQGALPGMVWQNRDVYLQGPIWAKIPHTDGNFHPSPLMGGFGLKHPPPQILIKNTPVPADPPTTFSQAKLASFITQYSTGQVSVEIEWELQKENSKRWNPEIQYTSNYYKSTNVDFAVNTEGTYSEPRPIGTRYLTRNL

SEQ ID NO: 437 - DNA, 2217 bp, Adeno-associated virus
atggctgctgacggttatcttccagattggctcgaggacaacctctctgagggcattcgcgagtggtgggacctgaaacctggagcccccaagcccaaggccaaccagcagaagcaggacgacggccggggtctggtgcttcctggctacaagtacctcggacccttcaacggactcgacaagggggagcccgtcaacgcggcggacgcagcggccctcgagcacgacaaggcctacgaccagcagctcaaagcgggtgacaatccgtacctgcggtataaccacgccgacgccgagtttcaggagcgtctgcaagaagatacgtcttttgggggcaacctcgggcgagcagtcttccaggccaagaagcgggttctcgaacctctcggtctggttgaggaagctgctaagacggctcctggaaagaagagaccggtagaaccgtcacctcagcgttcccccgactcctccacgggcatcggcaagaaaggccagcagcccgctaaaaagagactgaactttggtcagactggcgactcagagtcagtccccgaccctcaaccaatcggagaaccaccagcaggcccctctggtctgggatctggtacaatggctgcaggcggtggcgctccaatggcagacaataacgaaggcgccgacggagtgggtagttcctcaggaaattggcattgcgattccacatggctgggcgacagagtcatcaccaccagcacccgaacctgggccctgcccacctacaacaaccacctctacaagcaaatatccaatgggacatcgggaggaagcaccaacgacaacacctacttcggctacagcaccccctgggggtattttgacttcaacagattccactgccacttctcaccacgtgactggcagcgactcatcaacaacaactggggattccggccaaaaagactcagcttcaagctcttcaacatccaggtcaaggaggtcacgcagaatgaaggcaccaagaccatcgccaataaccttaccagcacgattcaggtatttacggactcggaataccagctgccgtacgtcctcggctccgcgcaccagggctgcctgcctccgttcccggcggacgtcttcatgattccccagtacggctaccttacactgaacaatggaagtcaagccgtaggccgttcctccttctactgcctggaatattttccatctcaaatgctgcgaactggaaacaattttgaattcagctacaccttcgaggacgtgcctttccacagcagctacgcacacagccagagcttggaccgactgatgaatcctctcatcgaccagtacctgtactacttatccagaactcagtccacaggaggaactcaaggtacccagcaattgttattttctcaagctgggcctgcaaacatgtcggctcaggctaagaactggctacctggaccttgctaccggcagcagcgagtctctacgacactgtcgcaaaacaacaacagcaactttgcttggactggtgccaccaaatatcacctgaacggaagagactctttggtaaatcccggtgtcgccatggcaacccacaaggacgacgaggaacgcttcttcccgtcgagtggagtcctgatgtttggaaaacagggtgctggaagagacaatgtggactacagcagcgttatgctaaccagcgaagaagaaattaaaaccactaaccctgtagccacagaacaatacggtgtggtggctgataacttgcagcaaaccaatacggggcctattgtgggaaatgtcaacagccaaggagccttacctggcatggtctggcagaaccgagacgtgtacctgcagggtcccatctgggccaagattcctcacacggacggcaacttccacccttcaccgctaatgggaggatttggactgaagcacccacctcctcagatcctgatcaagaacacgccggtacctgcggatcctccaacaacgttcagccaggcgaaattggcttccttcattacgcagtacagcaccggacaggtcagcgtggaaatcgagtgggagctgcagaaggagaacagcaaacgctggaacccagagattcagtacacttcaaactactacaaatctacaaatgtggactttgctgtcaatacagagggaacttattctgagcctcgccccattggtactcgttacctcacccgtaatctgtaa

SEQ ID NO: 438 - protein, 738 aa, Adeno-associated virus; identical to SEQ ID NO: 90

SEQ ID NO: 439 - protein, 738 aa, Adeno-associated virus
MAADGYLPDWLEDNLSEGIREWWDLKPGAPKPKANQQKQDDGRGLVLPGYKYLGPFNGLDKGEPVNAADAAALEHDKAYDQQLKAGDNPYLRYNHADAEFQERLQEDTSFGGNLGRAVFQAKKRVLEPLGLVEEAAKTAPGKKRPVEPSPQRSPDSSTGIGKKGQQPAKKRLNFGQTGDSESVPDPQPIGEPPAGPSGLGSGTMAAGGGAPMADNNEGADGVGSSSGNWHCDSTWLGDRVITTSTRTWALPTYNNHLYKQISNGTSGGSTNDNTYFGYSTPWGYFDFNRFHCHFSPRDWQRLINNNWGFRPKRLSFKLFNIQVKEVTQDEGTKTIANNLTSTIQVFTDSEYQLPYVLGSAHQGCLPPFPADVFMIPQYGYLTLNNGSQAVGRSSFYCLEYFPSQMLRTGNNFEFSYTFEDVPFHSSYAHSQSLDRLMNPLIDQYLYYLSRTQSTGGTQGTQQLLFSQAGPANMSARAKNWLPGPCYRQQRVSTTLSQNNNSNFAWTGATKYHLNGRDSLVNPGVAMATHKDDEERFFPSSGVLMFGKQGAGRDNVDYSSVMLTSEEEIKTTNPVATEQYGVVADNLQQANTGPIVGNVNSQGALPGMVWQNRDVYLQGPIWAKIPHTDGNFHPSPLMGGFGLKHPPPQILIKNTPVPADPPTTFSQAKLASFITQYSTGQVSVEIEWELQKENSKRWNPEIQYTSNYYKSTNVDFAVNSEGTYSEPRPIGTRYLTRNL

SEQ ID NO: 440 - DNA, 2217 bp, Adeno-associated virus
atggctgctgacggttatcttccagattggctcgaggacaacctctctgagggcattcgcgagtggtgggacctgaaacctggagcccccaagcccaaggccaaccagcagaagcaggacgacggccggggtctggtgcttcctggctacaagtacctcggacccttcaacggactcgacaagggggagcccgtcaacgcggcggacgcagcggccctcgagcacgacaaggcctacgaccagcagctcaaagcgggtgacaatccgtacctgcggtataaccacgccgacgccgagtttcaggagcgtctgcaagaagatacgtcttttgggggcaacctcgggcgagcagtcttccaggccaagaagcgggttctcgaacctctcggtctggttgaggaagctgctaagacggctcctggaaagaagagaccggtagaaccgtcacctcagcgttcccccgactcctccacgggcatcggcaagaaaggccagcagcccgctaaaaagagactgaactttggtcagactggcgactcagagtcagtccccgaccctcaaccaatcggagaaccaccagcaggcccctctggtctgggatctggtacaatggctgcaggcggtggcgctccaatggcagacaataacgaaggcgccgacggagtgggtagttcctcaggaaattggcattgcgattccacatggctgggcgacagagtcatcaccaccagcacccgaacctgggccctgcccacctacaacaaccacctctacaagcaaatatccaatgggacatcgggaggaagcaccaacgacaacacctacttcggctacagcaccccctgggggtattttgacttcaacagattccactgccacttctcaccacgtgactggcagcgactcatcaacaacaactggggattccggccaaaaagactcagcttcaagctcttcaacatccaggtcaaggaggtcacgcaggatgaaggcaccaagaccatcgccaataaccttaccagcacgattcaggtatttacggactcggaataccagctgccgtacgtcctcggctccgcgcaccagggctgcctgcctccgttcccggcggacgtcttcatgattccccagtacggctaccttacactgaacaatggaagtcaagccgtaggccgttcctccttctactgcctggaatattttccatctcaaatgctgcgaactggaaacaattttgaattcagctacaccttcgaggacgtgcctttccacagcagctacgcacacagccagagcttggaccgactgatgaatcctctcatcgaccagtacctgtactacttatccagaactcagtccacaggaggaactcaaggtacccagcaattgttattttctcaagctgggcctgcaaacatgtcggctcgggctaagaactggctacctggaccttgctaccggcagcagcgagtctctacgacactgtcgcaaaacaacaacagcaactttgcttggactggtgccaccaaatatcacctgaacggaagagactctttggtaaatcccggtgttgctatggcaacgcataaggacgacgaggaacgtttctttccatcgagcggagtcctgatgtttggaaaacagggtgctggaagagacaatgtggactatagcagcgttatgctaaccagcgaggaagaaattaaaaccactaaccctgtagccacagaacaatacggtgtggtggctgacaacttgcagcaagccaatacagggcctattgtgggaaatgtcaacagccaaggagccttacctggcatggtctggcagaaccgagacgtgtacctgcagggtcccatctgggccaaaattcctcacacggacggcaattttcacccgtctcctctgatgggcggctttggactgaagcacccacctccccagatcctgatcaagaatacgccggtacctgcggatcctccaacgacgttcagccaggcaaaattggcttccttcatcacgcagtacagcaccggccaggtcagcgtggagatcgagtgggagctgcagaaggagaacagcaagcgatggaacccagaaattcagtacacttccaactactacaaatctacaaatgtggactttgctgtcaattctgagggtacatattcagagcctcgccccattggtactcgttatctgacacgtaatctgtaa

SEQ ID NO: 441 - DNA, 2211 bp, Adeno-associated virus
atggctgccgatggttatcttccagattggctcgaggacaacctctctgagggcattcgcgagtggtgggacttgaaacctggagccccgaaacccaaagccaaccagcaaaagcaggacgacggccggggcctggtgcttcctggctacaagtacctcggacccttcaacggactcgacaagggggagcccgtcaacgcggcggacgcagcggccctcgagcacgacaaggcctacgaccagcagctcgaagcgggtgacaatccgtacctgcggtataaccacgccgacgccgagtttcaggagcgtctgcaagaagatacgtcttttgggggcaacctcgggcgagcagtcttccaggccaagaagcgggttctcgaacctctcggtctggttgaggaaggcgctaagacggctcctggaaagaagagaccagtagagcagtcaccccaagaaccagactcctcctcgggcatcggcaagaaaggccaacagcccgccagaaaaagactcaattttggccagactggcgactcagagtcagttccagaccctcaacctctcggagaacctccagcagcgccctctggtgtgggacctaatacaatggctgcaggcggtggcgcaccaatggcagacaataacgaaggcgccgacggagtgggtagttcctcgggaaattggcattgcgattccacatggctgggcgacagagtcatcaccaccagcacccgaacctgggccctgcccacctacaacaaccacctctacaagcaaatctccaacgggacatcgggaggagccaccaacgacaacacctacttcggctacagcaccccctgggggtattttgactttaacagattccactgccacttttcaccacgtgactggcagcgactcatcaacaacaactggggattccggcccaagagactcagcttcaagctcttcaacatccaggtcaaggaggtcacgcagaatgaaggcaccaagaccatcgccaataacctcaccagcaccatccaggtgtttacggactcggagtaccagctgccgtacgttctcggctctgcccaccagggctgcctgcctccgttcccggcggacgtgttcatgattccccagtacggctacctaacactcaacaacggtagtcaggccgtgggacgctcctccttctactgcctggaatactttccttcgcagatgctgagaaccggcaacaacttccagtttacttacaccttcgaggacgtgcctttccacagcagctacgcccacagccagagcttggaccggctgatgaatcctctgattgaccagtacctgtactacttgtctcggactcaaacaacaggaggcacggcaaatacgcagactctgggcttcagccaaggtgggcctaatacaatggccaatcaggcaaagaactggctgccaggaccctgttaccgccaacaacgcgtctcaacgacaaccgggcaaaacaacaatagcaactttgcctggactgctgggaccaaataccatctgaatggaagaaattcattggctaatcctggcatcgctatggcaacacacaaagacgacgaggagcgttttttcccagtaacgggatcctgtttttggcaacaaaatgctgccagagacaatgcggattacagcgatgtcatgctcaccagcgaggaagaaatcaaaaccactaaccctgtggctacagaggaatacggtatcgtggcagataacttgcagcagcaaaacacggctcctcaaattggaactgtcaacagccagggggccttacccggtatggtctggcagaaccgggacgtgtacctgcagggtcccatctgggccaagattcctcacacggacggcaacttccacccgtctccgctgatgggcggctttggcctgaaacatcctccgcctcagatcctgatcaagaacacgcctgtacctgcggatcctccgaccaccttcaaccagtcaaagctgaactctttcatcacgcaatacagcaccggacaggtcagcgtggaaattgaatgggagctacagaaggaaaacagcaagcgctggaaccccgagatccagtacacctccaactactacaaatctacaagtgtggactttgctgttaatacagaaggcgtgtactctgaaccccgccccattggcacccgttacctcacccgtaatctgtaa

SEQ ID NO: 442 - protein, 736 aa, Adeno-associated virus
MAADGYLPDWLEDNLSEGIREWWDLKPGAPKPKANQQKQDDGRGLVLPGYKYLGPFNGLDKGEPVNAADAAALEHDKAYDQQLEAGDNPYLRYNHADAEFQERLQEDTSFGGNLGRAVFQAKKRVLEPLGLVEEGAKTAPGKKRPVEQSPQEPDSSSGIGKKGQQPARKRLNFGQTGDSESVPDPQPLGEPPAAPSGVGPNTMAAGGGAPMADNNEGADGVGSSSGNWHCDSTWLGDRVITTSTRTWALPTYNNHLYKQISNGTSGGATNDNTYFGYSTPWGYFDFNRFHCHFSPRDWQRLINNNWGFRPKRLSFKLFNIQVKEVTQNEGTKTIANNLTSTIQVFTDSEYQLPYVLGSAHQGCLPPFPADVFMIPQYGYLTLNNGSQAVGRSSFYCLEYFPSQMLRTGNNFQFTYTFEDVPFHSSYAHSQSLDRLMNPLIDQYLYYLSRTQTTGGTANTQTLGFSQGGPNTMANQAKNWLPGPCYRQQRVSTTTGQNNNSNFAWTAGTKYHLNGRNSLANPGIAMATHKDDEERFFPVTGSCFWQQNAARDNADYSDVMLTSEEEIKTTNPVATEEYGIVADNLQQQNTAPQIGTVNSQGALPGMVWQNRDVYLQGPIWAKIPHTDGNFHPSPLMGGFGLKHPPPQILIKNTPVPADPPTTFNQSKLNSFITQYSTGQVSVEIEWELQKENSKRWNPEIQYTSNYYKSTSVDFAVNTEGVYSEPRPIGTRYLTRNL

SEQ ID NO: 443 - DNA, 2214 bp, Adeno-associated virus
atggctgctgacggttatcttccagattggctcgaggacaacctctctgagggcattcgcgagtggtgggacctgaaacctggagcccccaagcccaaggccaaccagcagaagcaggacgacggccggggtctggtgcttcctggctacaagtacctcggacccttcaacggactcgacaagggggagcccgtcagcgcggcggacgcagcggccctcgagcacgacaaggcctgcgaccagcggctcaaagcgggtgacaatccgtacctgcggtataaccacgccgacgccgagtttcaggagcgtctgcaagaagatacgtcttttgggggcaacctcgggcgagcagtcttccaggccaagaagcgggttctcgaacctctcggtctggttgaggaagctgctaagacggctcctggaaagaagggaccggtagaaccgtcacctcagcgttcccccgactcctccacgggcatcggcaagaaaggccagcagcccgctagaaagagactgaactttgggcagactggcgactcagagtcagtccccgaccctcaaccaatcggagaaccaccagcaggcccctctggtctgggatctggtacaatggctgcaggcggtggcgcaccaatggctgacaataacgagggcgccgacggagtgggtaatgcctcaggaaattggcattgcgattccacatggctgggcgacagagtcatcaccaccagcacccgaacctgggctttgcccacctacaacaatcacctctacaagcaaatctccagtcagtcagcaggtagcaccaacgacaacgtctacttcggctacagcaccccctgggggtattttgacttcaacagattccactgtcacttctcaccacgtgactggcagcggctcatcaacaacaactggggattccggcccaagaagctcaacttcaagctgttcaacatccaggtcaaggaggtcacaacgaatgacggcgtcacgaccatcgccaataaccttaccagcacggttcaggtcttttcggactcggaataccagctgccctacgtcctcggctccgcacaccagggctgcctgcctccgttcccggcggacgtcttcatgattccccagtacggctacctgactctgaacaatggcagccaatcggtgggtcgttcctctttctactgcctggaatatttcccttctcaaatgctgagaacgggcaacaacttcaccttcagctacaccttcgaggacgttcccttccacagcagctacgcacacagccagagcctggaccggctgatgaatcctcttatcgaccagtacctgtattacctggccagaacacagagcaacgcaggaggcacagctggcaatcgggaactgcagttttatcagggcgggcctaccaccatggccgaacaagccaaaaactggctgcctggaccttgcttccggcaacaaagagtctccaagacgctggatcaaaacaacaacagcaactttgcttggactggtgccaccaaataccatctaaatggaagaaattcattggttaatcccggtgtcgccatggcaacccacaaggacgacgaggaacgcttcttcccttcgagcggagtcctgatttttggaaaaactggagcagctaataagactacactggaaaatgtgttaatgacaaatgaagaggaaattcgtcctaccaacccggtagccaccgaggaatacgggactgttagcagcaacctgcaggcggctaacactgcagcccagacacaagttgtcaacaaccagggagccttacctggtatggtctggcagaaccgggacgtgtacctgcagggtcccatctgggccaagattcctcacacggacggcaactttcacccgtctccgctgatgggcggctttggactgaagcatccgcctcctcagatcctgatcaaaaacactcctgttcctgctaatcccccggaggtgtttacgcctgccaagtttgcttctttcatcacacagtacagcaccggccaggtcagcgtggagatcgagtgggagctgcagaaggagaacagcaagcgctggaacccagagattcagtatacctccaattttgacgaacagactggtgtggactttgccgttgacagccagggtgtttattctgagcctcgccccattggtactcgttacctcacccgtaatctgtaa

SEQ ID NO: 444 - protein, 737 aa, Adeno-associated virus
MAADGYLPDWLEDNLSEGIREWWDLKPGAPKPKANQQKQDDGRGLVLPGYKYLGPFNGLDKGEPVSAADAAALEHDKACDQRLKAGDNPYLRYNHADAEFQERLQEDTSFGGNLGRAVFQAKKRVLEPLGLVEEAAKTAPGKKGPVEPSPQRSPDSSTGIGKKGQQPARKRLNFGQTGDSESVPDPQPIGEPPAGPSGLGSGTMAAGGGAPMADNNEGADGVGNASGNWHCDSTWLGDRVITTSTRTWALPTYNNHLYKQISSQSAGSTNDNVYFGYSTPWGYFDFNRFHCHFSPRDWQRLINNNWGFRPKKLNFKLFNIQVKEVTTNDGVTTIANNLTSTVQVFSDSEYQLPYVLGSAHQGCLPPFPADVFMIPQYGYLTLNNGSQSVGRSSFYCLEYFPSQMLRTGNNFTFSYTFEDVPFHSSYAHSQSLDRLMNPLIDQYLYYLARTQSNAGGTAGNRELQFYQGGPTTMAEQAKNWLPGPCFRQQRVSKTLDQNNNSNFAWTGATKYHLNGRNSLVNPGVAMATHKDDEERFFPSSGVLIFGKTGAANKTTLENVLMTNEEEIRPTNPVATEEYGTVSSNLQAANTAAQTQVVNNQGALPGMVWQNRDVYLQGPIWAKIPHTDGNFHPSPLMGGFGLKHPPPQILIKNTPVPANPPEVFTPAKFASFITQYSTGQVSVEIEWELQKENSKRWNPEIQYTSNFDEQTGVDFAVDSQGVYSEPRPIGTRYLTRNL

SEQ ID NO: 445 - DNA, 2214 bp, Adeno-associated virus
atggctgccgatggttatcttccagattggctcgaggacaacctctctgagggcattcgcgagtggtgggacctgaaacctggagccccgaaacccaaagccaaccagcaaaagcaggacgacggccggggtctggtgcttcctggctacaagtacctcggacccttcaacggactcgacaagggggagcccgtcaacgcggcggacgcagcggccctcgagcacgacaaggcctacgaccagcagctcaaagcgggtgacaatccgtacctgcggtataaccacgccgacgccgagtttcaggagcgtctgcaagaagatacgtcttttgggggcaacctcgggcgagcagtcttccaggccaagaagcgggttctcgaacctctcggtctggttgaggaagctgctaagacggctcctggaaagaagagaccggtagaaccgtcacctcagcgttcccccgactcctccacgggcatcggcaagaaaggccagcagcccgctagaaagagactgaactttgggcagactggcgactcagagtcagtccccgaccctcaaccaatcggagaaccaccagcaggcccctctggtctgggatctggtacaatggctgcaggcggtggcgctccaatggcagacaataacgaaggcgccgacggagtgggtaatgcctcaggaaattggcattgcgattccacatggctgggcgacagagtcatcaccaccagcacccgaacctgggctttgcccacctacaacaaccacctctacaagcaaatctccagtcagtcagcaggtagcaccaacgacaacgtctacttcggctacagcaccccctgggggtattttgacttcaacagattccactgtcacttctcaccacgtgactggcagcggctcatcaacaacaactggggattccggcccaagaagctcaacttcaagctgttcaacatccaggtcaaggaggtcacaacgaatgacggcgtcacgaccatcgccaataaccttaccagcacggttcaggtcttttcggactcggaataccagctgccctacgtcctcggctccgcacaccagggctgcctgcctccgttcccggcggacgtcttcatgattcctcagtacggctacctgactctcaacaacggtagtcaggccgtgggacgttcctccttctactgcctggagtacttcccctctcagatgctgagaacgggcaacaacttttccttcagctacactttcgaggacgtgcctttccacagcagctacgcgcacagccagagtttggacaggctgatgaatcctctcatcgaccagtacctgtactacctgtcaagaacccagtctacgggaggcacagcgggaacccagcagttgctgttttctcaggccgggcctagcaacatgtcgactcaggccagaaactggctgcctggaccctgctacagacagcagcgcgtctccacgacactgtcgcaaaacaacaacagcaactttgcctggactggtgccaccaagtatcatctgaacggcagagactctctggtgaatccgggcgtcgccatggcaaccaacaaggacgacgaggaccgcttcttcccatccagcggcatcctcatgtttggcaagcagggagctggaaaagacaacgtggactatagcaacgtgatgctaaccagcgaggaagaaatcaagaccaccaaccccgtggccacagaacagtatggcgtggtggctgataacctacagcagcaaaacaccgctcctattgtgggggccgtcaacagccagggagccttacctggcatggtctggcagaaccgggacgtgtacctgcagggtcctatttgggccaagattcctcacacagatggcaactttcacccgtctcctttaatgggcggctttggacttaaacatccgcctcctcagatccttatcaaaaacactcctgttcctgcggatcctccaacagcgttcaaccaggccaagctgaattctttcatcacgcagtacagcaccggacaagtcagcgtggagatcgagtgggagctgcagaaggagaacagcaagcgctggaacccagagattcagtatacttccaactactacaaatctacaaatgtggactttgctgttaatactgagggtgcttactctgagcctcgccccattggcactcgttacctcacccgtaatctgtaa

SEQ ID NO: 446 - protein, 737 aa, Adeno-associated virus
MAADGYLPDWLEDNLSEGIREWWDLKPGAPKPKANQQKQDDGRGLVLPGYKYLGPFNGLDKGEPVNAADAAALEHDKAYDQQLKAGDNPYLRYNHADAEFQERLQEDTSFGGNLGRAVFQAKKRVLEPLGLVEEAAKTAPGKKRPVEPSPQRSPDSSTGIGKKGQQPARKRLNFGQTGDSESVPDPQPIGEPPAGPSGLGSGTMAAGGGAPMADNNEGADGVGNASGNWHCDSTWLGDRVITTSTRTWALPTYNNHLYKQISSQSAGSTNDNVYFGYSTPWGYFDFNRFHCHFSPRDWQRLINNNWGFRPKKLNFKLFNIQVKEVTTNDGVTTIANNLTSTVQVFSDSEYQLPYVLGSAHQGCLPPFPADVFMIPQYGYLTLNNGSQAVGRSSFYCLEYFPSQMLRTGNNFSFSYTFEDVPFHSSYAHSQSLDRLMNPLIDQYLYYLSRTQSTGGTAGTQQLLFSQAGPSNMSTQARNWLPGPCYRQQRVSTTLSQNNNSNFAWTGATKYHLNGRDSLVNPGVAMATNKDDEDRFFPSSGILMFGKQGAGKDNVDYSNVMLTSEEEIKTTNPVATEQYGVVADNLQQQNTAPIVGAVNSQGALPGMVWQNRDVYLQGPIWAKIPHTDGNFHPSPLMGGFGLKHPPPQILIKNTPVPADPPTAFNQAKLNSFITQYSTGQVSVEIEWELQKENSKRWNPEIQYTSNYYKSTNVDFAVNTEGAYSEPRPIGTRYLTRNL

SEQ ID NO: 447 - DNA, 2217 bp, Adeno-associated virus
atggctgccgatggttatcttccagattggctcgaggacaacctctctgagggcattcgcgagtggtgggacctgaaacctggagccccgaaacccaaagccaaccagcaaaagcaggacgacggccggggtctggtgcttcctggctacaagtacctcggacccttcaacggactcgacaagggggagcccgtcaacgcggcggacgcagcggccctcgagcacgacaaggcctacgaccagcagctcaaagcgggtgacaatccgtacctgcggtataatcacgccgacgccgagtttcaggagcgtctgcaagaagatacgtcttttgggggcaacctcgggcgagcagtcttccaggccaagaagcgggttctcgaacctctcggtctggttgaggaaggcgctaagacggctcctggaaagaagagaccggtagagccgtcaccacagcgttcccccgactcctccacgggcatcggcaagaaaggccagcagcccgccagaaagagactcaatttcggtcagactggcgactcagagtcagtccccgaccctcaacctatcggagaacctccagcagcgccctctagtgtgggatctggtacaatggctgcaggcggtggcgcaccaatggcagacaataacgaaggtgccgacggagtgggtagttcctcgggaaattggcattgcgattccacatggctgggcgacagagtcatcaccaccagcacccgaacctgggccctgcccacctacaacaaccacctctacaagcaaatctccaacgggacctcgggaggcagcaccaacgacaacacctactttggctacagcaccccctgggggtattttgactttaacagattccactgccacttctcaccacgtgactggcagcgactcatcaacaacaactggggattccggcccaagagactcagcttcaagctcttcaacatccaggtcaaagaggtcacgcagaatgaaggcaccaagaccatcgccaataacctcaccagcaccatccaggtgtttacggactcggaataccagctgccgtacgtcctcggctctgcccaccagggctgcctgcctccgttcccggcggacgtcttcatgattcctcagtacggctacctgactctcaacaacggtagtcaggccgtgggacgttcctccttctactgcctggagtacttcccctctcagatgctgagaacgggcaacaacttttccttcagctacactttcgaggacgtgcctttccacagcagctacgcgcacagccagagtttggacaggctgatgaatcctctcatcgaccagtacctgtactacctgtcaagaacccagtctacgggaggcacagcgggaacccagcagttgctgttttctcaggccgggcctagcaacatgtcggctcaggccagaaactggctgcctggaccctgctacagacagcagcgcgtctccacgacactgtcgcaaaacaacaacagcaactttgcctggactggtgccaccaagtatcatctgaacggcagagactctctggtgaatccgggcgtcgccatggcaaccaacaaggacgacgaggaccgcttcttcccatccagcggcatcctcatgtttggcaagcagggagctggaaaagacaacgtggactatagcaacgtgatgctaaccagcgaggaagaaatcaaggccaccaaccccgtggccacagaacagtatggcgtggtggctgataacctacagcagcaaaacaccgctcctattgtgggggccgtcaacagccagggagccttacctggcatggtctggcagaaccgggacgtgtacctgcagggtcctatttgggccaagattcctcacacagatggcaactttcacccgtctcctttaatgggcggctttggacttaaacatccgcctcctcagatcctcatcaaaaacactcctgttcctgcggatcctccaacagcgttcaaccaggccaagctgaattctttcatcacgcagtacagcaccggacaagtcagcgtggagatcgagtgggagctgcagaaggagaacagcaagcgctggaacccagagattcagtatacttccaactactacaaatctacaaatgtggactttgctgttaatactgagggtgtttactctgagcctcgccccattggcactcgttacctcacccgtaatctgtaa

SEQ ID NO: 448 - protein, 738 aa, Adeno-associated virus
MAADGYLPDWLEDNLSEGIREWWDLKPGAPKPKANQQKQDDGRGLVLPGYKYLGPFNGLDKGEPVNAADAAALEHDKAYDQQLKAGDNPYLRYNHADAEFQERLQEDTSFGGNLGRAVFQAKKRVLEPLGLVEEGAKTAPGKKRPVEPSPQRSPDSSTGIGKKGQQPARKRLNFGQTGDSESVPDPQPIGEPPAAPSSVGSGTMAAGGGAPMADNNEGADGVGSSSGNWHCDSTWLGDRVITTSTRTWALPTYNNHLYKQISNGTSGGSTNDNTYFGYSTPWGYFDFNRFHCHFSPRDWQRLINNNWGFRPKRLSFKLFNIQVKEVTQNEGTKTIANNLTSTIQVFTDSEYQLPYVLGSAHQGCLPPFPADVFMIPQYGYLTLNNGSQAVGRSSFYCLEYFPSQMLRTGNNFSFSYTFEDVPFHSSYAHSQSLDRLMNPLIDQYLYYLSRTQSTGGTAGTQQLLFSQAGPSNMSAQARNWLPGPCYRQQRVSTTLSQNNNSNFAWTGATKYHLNGRDSLVNPGVAMATNKDDEDRFFPSSGILMFGKQGAGKDNVDYSNVMLTSEEEIKATNPVATEQYGVVADNLQQQNTAPIVGAVNSQGALPGMVWQNRDVYLQGPIWAKIPHTDGNFHPSPLMGGFGLKHPPPQILIKNTPVPADPPTAFNQAKLNSFITQYSTGQVSVEIEWELQKENSKRWNPEIQYTSNYYKSTNVDFAVNTEGVYSEPRPIGTRYLTRNL

SEQ ID NO: 449 - DNA, 2217 bp, Adeno-associated virus
atggctgccgatggttatcttccagattggctcgaggacaacctctctgagggcattcgcgagtggtgggacctgaaacctggagccccgaaacccaaagccaaccagcaaaagcaggacgacggccggggtctggtgcttcctggctacaagcacctcggacccttcaacggactcgacaagggggagcccgtcaacgcggcggacgcagcggccctcgagcacgacaaggcctacgaccagcagctcaaagcgggtgacaatccgtacctgcggtataatcacgctgacgccgagtttcaggagcgtctgcaagaagatacgtcttttgggggcaacctcgggcgagcagtcttccaggccaagaagcgggttctcgaacctctcggtctggttgaggaaggcgctaagacggctcctggaaagaagagaccggtagagccgtcaccacagcgttcccccgactcctccacgggcatcggcaagaaaggccagcagcccgccagaaagagactcaatttcggtcagactggcgactcagagtcagtccccgaccctcaacctatcggagaacctccagcagcgccctctagtgtgggatctggtacaatggctgcaggcggtggcgcaccaatggcagacaataacgaaggtgccgacggagtgggtagttcctcgggaaattggcattgcgattccacatggctgggcgacagagtcatcaccaccagcacccgaacctgggccctgcccacctacaacaaccacctctacaagcaaatctccaacgggacctcgggaggcagcaccaacgacaacacctactttggctacagcaccccctgggggtattttgactttaacagattccactgccacttctcaccacgtgactggcagcgactcatcaacaacaactggggattccggcccaagagactcagcttcaagctcttcaacatccaggtcaaagaggtcacgcagaatgaaggcaccaagaccatcgccaataaccttaccagcacggttcaggtcttttcggactcggaataccagctgccctacgtcctcggctccgcacaccagggctgcctgcctccgttcccggcggacgtcttcatgattccccagtacggctacctgactctgaacaatggcagccaatcggtgggtcgttcctctttctactgcctggaatatttcccttctcaaatgctgagaacgggcaacaacttcaccttcagctacaccttcgaggacgttcccttccacagcagctacgcacacagccagagcctggaccggctgatgaatcctcttatcgaccagtacctgtattacctggccagaacacagagcaacgcaggaggcacagctggcaatcgggaactgcagttttatcagggcgggcctaccaccatggccgaacaagccaaaaactggctgcctggaccttgcttccggcaacaaagagtctccaagacgctggatcaaaacaacaacagcaactttgcttggactggtgccaccaaataccatctaaatggaagaaattcattggttaatcccggtgtcgccatggcaacccacaaggacgacgaggaacgcttcttcccttcgagcggagtcctgatttttggaaaaactggagcagctaataagactacactggaaaatgtgttaatgacaaatgaagaggaaattcgtcctaccaacccggtagccaccgaggaatacgggactgttagcagcaacctgcaggcggctaacactgcagcccagacacaagttgtcaacaaccagggagccttacctggtatggtctggcagaaccgggacgtgtacctgcagggtcccatctgggccaagattcctcacacggacggcaactttcacccgtctccgctgatgggcggctttggactgaagcatccgcctcctcagatcctgatcaaaaacactcctgttcctgctaatcccccggaggtgtttacgcctgccaagtttgcttctttcatcacacagtacagcaccggccaggtcagcgtggagatcgagtgggagctgcagaaggagaacagcaagcgctggaacccagagattcagtatacctccaattttgacaaacagactggtgtggactttgccgttgacagccagggtgtttattctgagcctcgccccattggtactcgttacctcacccgtaatctgtaa

SEQ ID NO: 450 - protein, 738 aa, Adeno-associated virus
MAADGYLPDWLEDNLSEGIREWWDLKPGAPKPKANQQKQDDGRGLVLPGYKHLGPFNGLDKGEPVNAADAAALEHDKAYDQQLKAGDNPYLRYNHADAEFQERLQEDTSFGGNLGRAVFQAKKRVLEPLGLVEEGAKTAPGKKRPVEPSPQRSPDSSTGIGKKGQQPARKRLNFGQTGDSESVPDPQPIGEPPAAPSSVGSGTMAAGGGAPMADNNEGADGVGSSSGNWHCDSTWLGDRVITTSTRTWALPTYNNHLYKQISNGTSGGSTNDNTYFGYSTPWGYFDFNRFHCHFSPRDWQRLINNNWGFRPKRLSFKLFNIQVKEVTQNEGTKTIANNLTSTVQVFSDSEYQLPYVLGSAHQGCLPPFPADVFMIPQYGYLTLNNGSQSVGRSSFYCLEYFPSQMLRTGNNFTFSYTFEDVPFHSSYAHSQSLDRLMNPLIDQYLYYLARTQSNAGGTAGNRELQFYQGGPTTMAEQAKNWLPGPCFRQQRVSKTLDQNNNSNFAWTGATKYHLNGRNSLVNPGVAMATHKDDEERFFPSSGVLIFGKTGAANKTTLENVLMTNEEEIRPTNPVATEEYGTVSSNLQAANTAAQTQVVNNQGALPGMVWQNRDVYLQGPIWAKIPHTDGNFHPSPLMGGFGLKHPPPQILIKNTPVPANPPEVFTPAKFASFITQYSTGQVSVEIEWELQKENSKRWNPEIQYTSNFDKQTGVDFAVDSQGVYSEPRPIGTRYLTRNL

SEQ ID NO: 451 - protein, 737 aa, Adeno-associated virus
MAADGYLPDWLEDNLSEGIREWWDLKPGAPKPKANQQKQDDGRGLVLPGYKYLGPFNGLDKGEPVNAADAAALEHDKAYDQQLKAGDNPYLRYNHADAEFQERLQEDTSFGGNLGRAVFQAKKRVLEPLGLVEEAAKTAPGKKRPVEPSPQRSPDSSTGIGKKGQQPARKRLNFGQTGDSESVPDPQPIGEPPAGPSGLGSGTMAAGGGAPMADNNKGADGVGNASGNWHCDSTWLGDRVITTSTRTWALPTYNNHLYKQISSQSAGSTNDNVYFGYSTPWGYFDFNRFHCHFSPRDWQRLINSNWGFRPKKLNFKLFNIQVKEVTTNDGVTTIANNLTSTVQVFSDSEYQLPYVLGSAHQGCLPPFPADVFMIPQYGYLTLNNGSQSVGRSSFYCLEYFPSQMLRTGNNFTFSYTFEDVPFHSSYAHSQSLDRLMNPLIDQYLYYLARTQSNAGGTAGNRELQFYQGGPTTMAEQAKNWLPGPCFRQQRVSKTLDQNNNSNFAWTGATKYHLNGRNSLVNPGVAMATHKDDEERFFPSSGVLIFGKTGAANKTTLENVLMTNEEEIRPTNPVATEEYGTVSSNLQAANTAAQTQVVNNQGALPGMVWQNRDVYLQGPIWAKIPHTDGNFHPSPLMGGFGLKHPPPQILIKNTPVPANPPEVFTPAKFASFITQYSTGQVSVEIEWELQKENSKRWNPEIQYTSNFDKQTGVDFAVDSQGVYSEPRPIGTRYLTRNL

SEQ ID NO: 452 - protein, 737 aa, Adeno-associated virus
MAADGYLPDWLEDNLSEGIREWWDLKPGAPKPKANQQKQDDGRGLVLPGYKYLGPFNGLDKGEPVNAADAAALEHDKAYDQQLKAGDNPYLRYNHADAEFQERLQEDTSFGGNLGRAVFQAKKRVLEPLGLVEEAAKTAPGKKRPVEPSPQRSPDSSTGIGKKGQQPARKRLNFGQTGDSESVPDPQPIGEPPAGPSGLGSGTMAAGGGAPMADNNEGADGVGNASGNWHCDSTWLGDRVITTSTRTWALPTYNNHLYKQISSQSAGSTNDNVYFGYSTPWGYFDFNRFHCHFSPRDWQRLINSNWGFRPKKLNFKLFNIQVKEVTTNDGVTTIANNLTSTVQVFSDSEYQLPYVLGSAHQGCLPPFPADVFMIPQYGYLTLNNGSQSVGRSSFYCLEYFPSQMLRTGNNFTFSYTFEDVPFHSSYAHSQSLDRLMNPLIDQYLYYLARTQSNAGGTAGNRELQFYQGGPTTMAEQAKNWLPGPCFRQQRVSKTLDQNNNSNFAWTGATKYHLNGRNSLVNPGVAMATHKDDEERFFPSSGVLIFGKTGAANKTTLENVLMTNEEEIRPTNPVATEEYGTVSSNLQAANTAAQTQVVNNQGALPGMVWQNRDVYLQGPIWAKIPHTDGNFHPSPLMGGFGLKHPPPQILIKNTPVPANPPEVFTPAKFASFITQYSTGQVSVEIEWELQKENSKRWNPEIQYTSNFDKQTGVDFAVDSQGVYSEPRPIGTRYLTRNL

SEQ ID NO: 453 - protein, 737 aa, Adeno-associated virus
MAADGYLPDWLEDNLSEGIREWWDLKPGAPKPKANQQKQDDGRGLVLPGYKYLGPFNGLDKGEPVNAADAAALEHDKAYDQQLKAGDNPYLRYNHADAEFQERLQEDTSFGGNLGRAVFQAKKRVLEPLGLVEEAAKTAPGKKRPVEPSPQRSPDSSTGIGKKGQQPARKRLNFGQTGDSESVPDPQPIGEPPAGPSGLGSGTMAAGGGAPMADNNEGADGVGNASGNWHCDSTWLGDRVITTSTRTWALPTYNNHLYKQISSQSAGSTNDNVYFGYSTPWGYFDFNRFHCHFSPRDWQRLINNNWGFRPKKLNFKLFNIQVKEVTTNDGVTTIANNLTSTVQVFSDSEYQLPYVLGSAHQGCLPPFPADVFMIPQYGYLTLNNGSQSVGRSSFYCLEYFPSQMLRTGNNFTFSYTFEDVPFHSSYAHSQSLDRLMNPLIDQYLYYLARTQSNAGGTAGNRELQFYQGGPTTMAEQAKNWLPGPCFRQQRVSKTLDQNNNSNFAWTGATKYHLNGRNSLVNPGVAMATHKDDEERFFPSSGVLIFGKTGAANKTTLENVLMTNEEEIRPTNPVATEEYGTVSSNLQAANTAAQTQVVNNQGALPGMVWQNRDVYLQGPIWAKIPHTDGNFHPSPLMGGFGLKHPPPQILIKNTPVPANPPEVFTPAKFASFITQYSTGQVSVEIEWELQKENSKRWNPEIQYTSNFDKQTGVDFAVDSQGVYSEPRPIGTRYLTRNL

SEQ ID NO: 454 - protein, 737 aa, Adeno-associated virus
MAADGYLPDWLEDNLSEGIREWWDLKPGAPKPKANQQKQDDGRGLVLPGYKYLGPFNGLDKGEPVNAADAAALEHDKAYDQQLKAGDNPYLRYNHADAEFQERLQEDTSFGGNLGRAVFQAKKRVLEPLGLVEEAAKTAPGKKRPVEPSPQRSPDSSTGIGKKGQQPARKRLNFGQTGDSESVPDPQPIGEPPAGPSGLGSGTMAAGGGAPMADNNKGADGVGNASGNWHCDSTWLGDRVITTSTRTWALPTYNNHLYKQISSQSAGSTNDNVYFGYSTPWGYFDFNRFHCHFSPRDWQRLINNNWGFRPKKLNFKLFNIQVKEVTTNDGVTTIANNLTSTVQVFSDSEYQLPYVLGSAHQGCLPPFPADVFMIPQYGYLTLNNGSQSVGRSSFYCLEYFPSQMLRTGNNFTFSYTFEDVPFHSSYAHSQSLDRLMNPLIDQYLYYLARTQSNAGGTAGNRELQFYQGGPTTMAEQAKNWLPGPCFRQQRVSKTLDQNNNSNFAWTGATKYHLNGRNSLVNPGVAMATHKDDEERFFPSSGVLIFGKTGAANKTTLENVLMTNEEEIRPTNPVATEEYGTVSSNLQAANTAAQTQVVNNQGALPGMVWQNRDVYLQGPIWAKIPHTDGNFHPSPLMGGFGLKHPPPQILIKNTPVPANPPEVFTPAKFASFITQYSTGQVSVEIEWELQKENSKRWNPEIQYTSNFDKQTGVDFAVDSQGVYSEPRPIGTRYLTRNL

SEQ ID NO: 455 - DNA, 2214 bp, Adeno-associated virus
atggctgctgacggttatcttccagattggctcgaggacaacctctctgagggcattcgcgagtggtgggacctgaaacctggagcccccaagcccaaggccaaccagcagaagcaggacgacggccggggtctggtgcttcctggctacaagtacctcggacccttcaacggactcgacaagggggagcccgtcaacgcggcggacgcagcggccctcgagcacgacaaggcctacgaccagcagctcaaagcgggtgacaatccgtacctgcggtataaccacgccgacgccgagtttcaggagcgtctgcaagaagatacgtcttttgggggcaacctcgggcgagcagtcttccaggccaagaagcgggttctcgaacctctcggtctggttgaggaagctgctaagacggctcctggaaagaagagaccggtagaaccgtcacctcagcgttcccccgactcctccacgggcatcggcaagaaaggccagcagcccgctagaaagagactgaactttgggcagactggcgactcagagtcagtccccgaccctcaaccaatcggagaaccaccagcaggcccctctggtctgggatctggtacaatggctgcaggcggtggcgcaccaatggctgacaataacaagggcgccgacggagtgggtaatgcctcaggaaattggcattgcgattccacatggctgggcgacagagtcatcaccaccagcacccgaacctgggctttgcccacctacaacaaccacctctacaagcaaatctccagtcagtcagcaggtagcaccaacgacaacgtctacttcggctacagcaccccctgggggtattttgacttcaacagattccactgtcacttctcaccacgtgactggcagcggctcatcaacagcaactggggattccggcccaagaagctcaacttcaagctgttcaacatccaggtcaaggaggtcacaacgaatgacggcgtcacgaccatcgccaataaccttaccagcacggttcaggtcttttcggactcggaataccagctgccctacgtcctcggctccgcacaccagggctgcctgcctccgttcccggcggacgtcttcatgattccccagtacggctacctgactctgaacaatggcagccaatcggtgggtcgttcctctttctactgcctggaatatttcccttctcaaatgctgagaacgggcaacaacttcaccttcagctacaccttcgaggacgttcccttccacagcagctacgcacacagccagagcctggaccggctgatgaatcctcttatcgaccagtacctgtattacctggccagaacacagagcaacgcaggaggcacagctggcaatcgggaactgcagttttatcagggcgggcctaccaccatggccgaacaagccaaaaactggctgcctggaccttgcttccggcaacaaagagtctccaagacgctggatcaaaacaacaacagcaactttgcttggactggtgccaccaaataccatctaaatggaagaaattcattggttaatcccggtgtcgccatggcaacccacaaggacgacgaggaacgcttcttcccttcgagcggagtcctgatttttggaaaaactggagcagctaataagactacactggaaaatgtgttaatgacaaatgaagaggaaattcgtcctaccaacccggtagccaccgaggaatacgggactgttagcagcaacctgcaggcggctaacactgcagcccagacacaagttgtcaacaaccagggagccttacctggtatggtctggcagaaccgggacgtgtacctgcagggtcccatctgggccaagattcctcacacggacggcaactttcacccgtctccgctgatgggcggctttggactgaagcatccgcctcctcagatcctgatcaaaaacactcctgttcctgctaatcccccggaggtgtttacgcctgccaagtttgcttctttcatcacacagtacagcaccggccaggtcagcgtggagatcgagtgggagctgcagaaggagaacagcaagcgctggaacccagagattcagtatacctccaattttgacaaacagactggtgtggactttgccgttgacagccagggtgtttattctgagcctcgccccattggtactcgttacctcacccgtaatctgtaa

SEQ ID NO: 456 - DNA, 2217 bp, Adeno-associated virus
atggctgccgatggttatcttccagattggctcgaggacaacctctctgagggcattcgcgagtggtgggacctgaaacctggagccccgaaacccaaagccaaccagcaaaagcaggacgacggccggggtctggtgcttcctggctacaagtacctcggacccttcaacggactcgacaagggggagcccgtcaacgcggcggacgcagcggccctcgagcacgacaaggcctacgaccagcagctcaaagcgggtgacaatccgcacctgcggtataatcacgccgacgccgagtttcaggagcgtctgcaagaagatacgtcttttgggggcaacctcgggcgagcagtcttccaggccaagaagcgggttctcgaacctctcggtctggttgaggaaggcgctaagacggctcctggaaagaagagaccggtagagccgtcaccacagcgttcccccgactcctccacgggcatcggcaagaaaggccagcagcccgccagaaagagactcaatttcggtcagactggcgactcagagtcagtccccgaccctcaacttatcggagaacctccagcagcgccctctagtgtgggatctggtacaatggctgcaggcggtggcgcaccaatggcagacaataacgaaggtgccgacggagtgggtagttcctcgggaaattggcattgcgattccacatggctgggcgacagagtcatcaccaccagcacccgaacctgggccctgcccacctacaacaaccacctctacaagcaaatctccaacgggacctcgggaggcagcaccaacgacaacacctactttggctacagcaccccctgggggtattttgactttaacagattccactgccacttctcaccacgtgactggcagcgactcatcaacaacaactggggattccggcccaagagactcagcttcaagctcttcaacatccaggtcaaagaggtcacgcagaatgaaggcaccaagaccatcgccaataacctcaccagcaccatccaggtgtttacggactcggagtaccagctgccgtacgtcctcggctctgcccaccagggctgcctgcctccgttcccggcggacgtcttcatgattcctcagtacggcaacctgactctcaacaacggtagtcaggccgtgggacgttcctccttctactgcctggagtacttcccctctcagatgctgagaacgggcaacaacttttccttcagctacactttcgaggacgtgcctttccacagcagctacgcgcacagccagagtttggacaggctgatgaatcctctcatcgaccagtacctgtactacctgtcaagaacccagtctacgggaggcacagcgggaacccagcagttgctgttttctcaggccgggcctagcaacatgtcggctcaggccagaaactggctgcctggaccctgctacagacagcagcgcgtctccacgacactgtcgcaaaacaacaacagcaactttgcctggactggtgccaccaagtatcatctgaacggcagagactctctggtgaatccgggcgtcgccatggcaaccaacaaggacgacgaggaccgcttcttcccatccagcggcatcctcatgtttggcaagcagggagctggaaaagacaacatgggctatagcaacgtgatgctaaccagcgaggaagaaatcaagaccaccaaccccgtggccacagaacagtatggcgtggtggctgataacctacagcagcaaaacaccgctcctattgtgggggccgtcaacagccagggagccttacctggcatggtctggcagaaccgggacgtgtacctgcagggtcctatttgggccaagattcctcacacagatggcaactttcacccgtctcctttaatgggcggctttggacttaaacatccgcctcctcagatcctcatcaaaaacactcctgttcctgcggatcctccaacagcgttcaaccaggccaagctgaattctttcatcacgcagtacggcaccggacaagtcagcgtggagatcgagtgggagctgcagaaggagaacagcaagcgctggaacccagagattcagtatacttccaactactacaaatctacaaatgtggactttgctgttaatactgagggtgtttactctgagcctcgccccattggcactcgttacctcacccgtaatctgtaa

SEQ ID NO: 457 - protein, 738 aa, Adeno-associated virus
MAADGYLPDWLEDNLSEGIREWWDLKPGAPKPKANQQKQDDGRGLVLPGYKYLGPFNGLDKGEPVNAADAAALEHDKAYDQQLKAGDNPHLRYNHADAEFQERLQEDTSFGGNLGRAVFQAKKRVLEPLGLVEEGAKTAPGKKRPVEPSPQRSPDSSTGIGKKGQQPARKRLNFGQTGDSESVPDPQLIGEPPAAPSSVGSGTMAAGGGAPMADNNEGADGVGSSSGNWHCDSTWLGDRVITTSTRTWALPTYNNHLYKQISNGTSGGSTNDNTYFGYSTPWGYFDFNRFHCHFSPRDWQRLINNNWGFRPKRLSFKLFNIQVKEVTQNEGTKTIANNLTSTIQVFTDSEYQLPYVLGSAHQGCLPPFPADVFMIPQYGNLTLNNGSQAVGRSSFYCLEYFPSQMLRTGNNFSFSYTFEDVPFHSSYAHSQSLDRLMNPLIDQYLYYLSRTQSTGGTAGTQQLLFSQAGPSNMSAQARNWLPGPCYRQQRVSTTLSQNNNSNFAWTGATKYHLNGRDSLVNPGVAMATNKDDEDRFFPSSGILMFGKQGAGKDNMGYSNVMLTSEEEIKTTNPVATEQYGVVADNLQQQNTAPIVGAVNSQGALPGMVWQNRDVYLQGPIWAKIPHTDGNFHPSPLMGGFGLKHPPPQILIKNTPVPADPPTAFNQAKLNSFITQYGTGQVSVEIEWELQKENSKRWNPEIQYTSNYYKSTNVDFAVNTEGVYSEPRPIGTRYLTRNL

SEQ ID NO: 458 - DNA, 2217 bp, Adeno-associated virus
atggctgccgatggttatcttccagattggctcgaggacaacctctctgagggcattcgcgagtggtgggacctgaaacctggagccccgaaacccaaagccaaccagcaaaagcaggacgacggccggggtctggtgcttcctggctacaagtacctcggacccttcaacggactcgacaagggggagcccgtcaacgcggcggacgcagcggccctcgagcacgacaaggcctacgaccagcagctcaaagcgggtgacaatccgtacctgcggtataatcacgccgacgccgagtttcaggagcgtctgcaagaagatacgtcttttgggggcaacctcgggcgagcagtcttccaggccaagaagcgggttctcgaacctctcggtctggttgaggaaggcgctaagacggctcctggaaagaagagaccggtagagccgtcaccacagcgttcccccgactcctccacgggcatcggcaagaaaggccagcagcccgccggaaagagactcaatttcggtcagactggcgactcagagtcagtccccgaccctcaacctatcggagaacctccagcagcgccctctagtgtgggatctggtacaatggctgcaggcggtggcgcaccaatggcagacaataacgaaggtgccgacggagtgggtagttcctcgggaaattggcattgcgattccacatggctgggcgacagagtcatcaccaccagcacccgaacctgggccctgcccacctacaacaaccacctctacaagcaaatctccaacgggacctcgggaggcagcaccaacgacaacacctactttggctacagcaccccctgggggtattttgactttaacagattccactgccacttctcaccacgtgactggcagcgactcatcaacaacaactggggattccggcccaagagactcagcttcaagctcttcaacatccaggtcaaagaggtcacgcagaatgaaggcaccaagaccatcgccaataacctcaccagcaccatccaggtgtttacggactcggaataccagctgccgtacgtcctcggctctgcccaccagggctgcctgcctccgttcccggcggacgtcttcatgattcctcagtacggctacctgactctcaacaacggtagtcaggccgtgggacgttcctccttctactgcctggagtacttcccctctcagatgctgagaacgggcaacaacttttccttcagctacactttcgaggacgtgcctttccacagcagctacgcgcacagccagagtttggacaggctgatgaatcctctcgtcgaccagtacctgtactacctgtcaagaacccagtctacgggaggcacagcgggaacccagcagttgctgttttctcaggccgggcctagcaacatgtcggctcaggccagaaactggctgcctggaccctgctacagacagcagcgcgtctccacgacactgtcgcaaaacaacaacagcaactttgcctggactggtgccaccaagtatcatctgaacggcagagactctctggtgaatccgggcgtcgccatggcaaccaacaaggacgacgaggaccgcttcttcccatccagcggcatcctcatgtttggcaagcagggagctggaaaagacaacgtggactatagcaacgtgatgctaaccagcgaggaagaaatcaagaccaccaaccccgtggccacagaacagtatggcgtggtggctgataacctacagcagcaaaacaccgctcctattgtgggggccgtcaacagccagggagccttacctggcatggtctggcagaaccgggacgtgtacctgcagggtcctatttgggccaagattcctcacacagatggcaactttcacccgtctcctttaatgggcggctttggacttaaacatccgcctcctcagatcctcatcaaaaacactcctgttcctgcggatcctccaacagcgttcaaccaggccaagctgaattctttcatcacgcagtacagcaccggacaagtcagcgtggagatcgagtgggagctgcagaaggagaacagcaagcgctggagcccagagattcagtatacttccaactactacaaatctacaaatgtggactttgctgttaatactgagggtgtttactctgagcctcgccccattggcactcgttacctcacccgtaatctgtaa

SEQ ID NO: 459 - protein, 738 aa, Adeno-associated virus
MAADGYLPDWLEDNLSEGIREWWDLKPGAPKPKANQQKQDDGRGLVLPGYKYLGPFNGLDKGEPVNAADAAALEHDKAYDQQLKAGDNPYLRYNHADAEFQERLQEDTSFGGNLGRAVFQAKKRVLEPLGLVEEGAKTAPGKKRPVEPSPQRSPDSSTGIGKKGQQPAGKRLNFGQTGDSESVPDPQPIGEPPAAPSSVGSGTMAAGGGAPMADNNEGADGVGSSSGNWHCDSTWLGDRVITTSTRTWALPTYNNHLYKQISNGTSGGSTNDNTYFGYSTPWGYFDFNRFHCHFSPRDWQRLINNNWGFRPKRLSFKLFNIQVKEVTQNEGTKTIANNLTSTIQVFTDSEYQLPYVLGSAHQGCLPPFPADVFMIPQYGYLTLNNGSQAVGRSSFYCLEYFPSQMLRTGNNFSFSYTFEDVPFHSSYAHSQSLDRLMNPLVDQYLYYLSRTQSTGGTAGTQQLLFSQAGPSNMSAQARNWLPGPCYRQQRVSTTLSQNNNSNFAWTGATKYHLNGRDSLVNPGVAMATNKDDEDRFFPSSGILMFGKQGAGKDNVDYSNVMLTSEEEIKTTNPVATEQYGVVADNLQQQNTAPIVGAVNSQGALPGMVWQNRDVYLQGPIWAKIPHTDGNFHPSPLMGGFGLKHPPPQILIKNTPVPADPPTAFNQAKLNSFITQYSTGQVSVEIEWELQKENSKRWSPEIQYTSNYYKSTNVDFAVNTEGVYSEPRPIGTRYLTRNL

SEQ ID NO: 460 - DNA, 2217 bp, Adeno-associated virus
atggttgccgatggttatcttccagattggctcgaggacaacctctctgagggcattcgcgagtggtgggacctgaaacctggagccccgaaacccaaagccaaccagcaaaagcagggcgacggccggggtctggtgcttcctggctacaagtacctcggacccttcaacggactcgacaagggggagcccgtcaacgcggcggacgcagcggccctcgagcacgacaaggcctacgaccagcagcttaaagcgggtgacaatccgtacctgcggtataatcacgccgacgccgagcttcaggagcgtctgcaagaagatacgtcttttgggggcaacctcgggcgagcagtcttccaggccaagaagcgggttctcgaacctctcggtctggttgaggaaggcgctaagacggctcctggaaagaagagaccggtagagccgtcaccacagcgttcccccgactcctccacgggcatcggcaagaaaggccagcagcccgccagaaagagactcaatttcggtcagactggcgactcagagtcagtccccgaccctcaacctatcggagaacctccagcagcgccctctagtgtgggatctggtacaatggctgcaggcggtggcgcgccaatggcagacaataacgaaggtgccgacggagtgggtagttcctcgggaaattggcattgcgattccacatggctgggcgacagagtcatcaccaccagcacccgaacctgggccctgcccacctacaacaaccacctctacaagcaaatctccaacgggacctcgggaggcagcaccaacgacaacacctactttggctacagcaccccctgggggtattttgactttaacagattccactgccacttctcaccacgtgactggcagcgactcatcaacaacaactggggattccggcccaagagactcagcttcaagctcttcaacatccaggtcaaagaggtcacgcagaatgaaggcaccaagaccatcgccaataacctcaccagcaccatccaggtgtttacggactcggaataccagctgccgtacgtcctcggctctgcccaccagggctgccagcctccgttcccggcggacgtcttcatgattcctcagtacggctacctgactctcaacaacggtagtcaggccgtgggacgttcctccttctactgcctggagtacttcccctctcagatgctgagaacgggcaacaacttttccttcagctacactttcgaggacgtgcctttccacagcagctacgcgcacagccagagtttggacaggctgatgaatcctctcatcgaccagtacctgtactacctgtcaagaacccagtctacgggaggcacagcgggaacccagcagttgctgttttctcaggccgggcctagcaacatgtcggctcaggccagaaactggctgcctggaccctgctacagacagcagcgcgtctccacgacactgtcgcaaaacaacaacagcaactttgcctggactggtgccaccaagtatcatctgaacggcagagactctctggtgaatccgggcgtcgccatggcaaccaacaaggacgacgaggaccgcttcttcccatccagcggcatcctcatgtttggcaagcagggagctggaaaagacaacgtggactatagcaacgtgatgctaaccagcgaggaagaaatcaagaccaccaaccccgtggccacagaacagtatggcgtggtggctgataacctacagcagcaaaacaccgctcctattgtgggggccgtcaacagccagggagccttacctggcatggtctggcagaaccgggacgtgtacctgcagggtcctatttgggccaagattcctcacacagatggcaactttcacccgtctcctttaatgggcggctttggacttaaacatccgcctcctcagatcctcatcaaaaacactcctgttcctgcggatcctccaacagcgttcaaccaggccaagctgaattctttcatcacgcagtacagcaccggacaagtcagcgtggagatcgagtgggagccgcagaaggagaacagcaagcgctggaacccagagattcagtatacttccaactactacaaatctacaaatgtggactttgctgttaatactgagggtgtttactctgagcctcgccccattggcactcgttacctcacccgtaatctgtaa

SEQ ID NO: 461 - protein, 738 aa, Adeno-associated virus
MVADGYLPDWLEDNLSEGIREWWDLKPGAPKPKANQQKQGDGRGLVLPGYKYLGPFNGLDKGEPVNAADAAALEHDKAYDQQLKAGDNPYLRYNHADAELQERLQEDTSFGGNLGRAVFQAKKRVLEPLGLVEEGAKTAPGKKRPVEPSPQRSPDSSTGIGKKGQQPARKRLNFGQTGDSESVPDPQPIGEPPAAPSSVGSGTMAAGGGAPMADNNEGADGVGSSSGNWHCDSTWLGDRVITTSTRTWALPTYNNHLYKQISNGTSGGSTNDNTYFGYSTPWGYFDFNRFHCHFSPRDWQRLINNNWGFRPKRLSFKLFNIQVKEVTQNEGTKTIANNLTSTIQVFTDSEYQLPYVLGSAHQGCQPPFPADVFMIPQYGYLTLNNGSQAVGRSSFYCLEYFPSQMLRTGNNFSFSYTFEDVPFHSSYAHSQSLDRLMNPLIDQYLYYLSRTQSTGGTAGTQQLLFSQAGPSNMSAQARNWLPGPCYRQQRVSTTLSQNNNSNFAWTGATKYHLNGRDSLVNPGVAMATNKDDEDRFFPSSGILMFGKQGAGKDNVDYSNVMLTSEEEIKTTNPVATEQYGVVADNLQQQNTAPIVGAVNSQGALPGMVWQNRDVYLQGPIWAKIPHTDGNFHPSPLMGGFGLKHPPPQILIKNTPVPADPPTAFNQAKLNSFITQYSTGQVSVEIEWEPQKENSKRWNPEIQYTSNYYKSTNVDFAVNTEGVYSEPRPIGTRYLTRNL

SEQ ID NO: 462 - DNA, 2217 bp, Adeno-associated virus
atggctgccgatggttatcttccagattggctcgaggacaacctctctgagggcattcgcgagtggtgggacctgaaacctggagccccgaaacccaaagccaaccagcaaaagcaggacgacggccggggtctggtgcttcctggctacaagtacctcggacccttcaacggactcgacaagggggagcccgtcaacgcggcggacgcagcggccctcgagcacgacaaggcctacgaccagcagctcaaagcgggtgacaatccgtacctgcggtataatcacgccgacgccgagtttcaggagcgtctgcaagaagatacgtcttttgggggcaacctcgggcgagcagtcttccaggccaagaagcgggttctcgaacctctcggtctggttgaggaaggcgctaagacggctcctggaaagaagagaccggtagagccgtcaccacagcgttcccccgactcctccacgggcatcggcaagaaaggccagcagcccgccagaaagagactcaatttcggtcagactggcgactcagagtcagtccccgaccctcaacctatcggagaacctccagcagcgccctctagtgtgggatctggtacaatggctgcaggcggtggcgcaccaatggcagacaataacgaaggtgccgacggagtgggtagttcctcgggaaattggcattgcgattccacatggctgggcgacagagtcatcaccaccagcacccgaacctgggccctgcccacctacaacaaccacctctacaagcaaatctccaacgggacctcgggaggcagcaccaacgacaacacctactttggctacagcaccccctgggggtattttgactttaacagattccactgccacttctcaccacgtgactggcagcgactcatcaacaacaactggggattccggcccaagagactcagcttcaagctcttcaacatccaggtcaaagaggtcacgcagaatgaaggcaccaagaccatcgccaatagcctcaccagcaccatccaggtgtttacggactcggaataccagctgccgtacgtcctcggctctgcccaccagggctgcctgcctccgttcccggcggacgtcttcatgattcctcagtacggctacctgactcccaacaacggtagtcaggccgtgggacgttcctccttctactgcctggagtacttcccctctcagatgctgagaacgggcaacaacttttccttcagctacactttcgaggacgtgcctttccacagcagctacgcgcacagccagagtttggacaggctgatgaatcctctcatcgaccagtacctgtactacctgtcaagaacccagtctacgggaggcacagcgggaacccagcagttgctgtcttctcaggccgggcctagcaacatgtcggctcaggccagaaactggctgcctggaccctgctacagacagcagcgcgtctccacgacactgtcgcaaaacaacaacagcaactttgcctggactggtgccaccaagtatcatctgaacggcagagactctctggtgaatccgggcgtcgccatggcaaccaacaaggacgacgaggaccgcttcttcccatccagcggcatcctcatgtttggcaagcagggagctggaaaagacaacgtggactatagcaacgtgatgctaaccagcgaggaagaaatcaagaccaccaaccccgtggccacagaacagtatggcgtggtggctgataacctacagcagcaaaacaccgctcctattgtgggggccgtcaacagccagggagccttacctggcatggtctggcagaaccgggacgtgtacttgcagggtcctatttgggccaagattcctcacacagatggcaactttcacccgtctcctttaatgggcggctttggacttaaacatccgcctcctcagatcctcatcaaaaacactcctgttcctgcggatcctccaacagcgttcaaccaggccaagctgaattctttcatcacgcagtacagcaccggacaagtcagcgtggagatcgagtgggagctgcagaaggagaacagcaagcgctggaacccagagattcagtatacttccaactactacaaatctacaaatgtggactttgctgttaatactgagggtgtttactctgagcctcgccccattggcactcgttacctcacccgtaatctgtaa

SEQ ID NO: 463 - protein, 738 aa, Adeno-associated virus
MAADGYLPDWLEDNLSEGIREWWDLKPGAPKPKANQQKQDDGRGLVLPGYKYLGPFNGLDKGEPVNAADAAALEHDKAYDQQLKAGDNPYLRYNHADAEFQERLQEDTSFGGNLGRAVFQAKKRVLEPLGLVEEGAKTAPGKKRPVEPSPQRSPDSSTGIGKKGQQPARKRLNFGQTGDSESVPDPQPIGEPPAAPSSVGSGTMAAGGGAPMADNNEGADGVGSSSGNWHCDSTWLGDRVITTSTRTWALPTYNNHLYKQISNGTSGGSTNDNTYFGYSTPWGYFDFNRFHCHFSPRDWQRLINNNWGFRPKRLSFKLFNIQVKEVTQNEGTKTIANSLTSTIQVFTDSEYQLPYVLGSAHQGCLPPFPADVFMIPQYGYLTPNNGSQAVGRSSFYCLEYFPSQMLRTGNNFSFSYTFEDVPFHSSYAHSQSLDRLMNPLIDQYLYYLSRTQSTGGTAGTQQLLSSQAGPSNMSAQARNWLPGPCYRQQRVSTTLSQNNNSNFAWTGATKYHLNGRDSLVNPGVAMATNKDDEDRFFPSSGILMFGKQGAGKDNVDYSNVMLTSEEEIKTTNPVATEQYGVVADNLQQQNTAPIVGAVNSQGALPGMVWQNRDVYLQGPIWAKIPHTDGNFHPSPLMGGFGLKHPPPQILIKNTPVPADPPTAFNQAKLNSFITQYSTGQVSVEIEWELQKENSKRWNPEIQYTSNYYKSTNVDFAVNTEGVYSEPRPIGTRYLTRNL

SEQ ID NO: 464 - protein, 738 aa, Adeno-associated virus
MAADGYLPDWLEDNLSEGIREWWDLKPGAPKPKANQQKQDDGRGLVLPGYKYLGPFNGLDKGEPVNAADAAALEHDKAYDQQLKAGDNPYLRYNHADAEFQERLQEDTSFGGNLGRAVFQAKKRVLEPLGLVEEGAKTAPGKKRPVEPSPQRSPDSSTGIGKKGQQPARKRLNFGQTGDSESVPDPQPIGEPPAAPSSVGSGTMAAGGGAPMADNNEGADGVGSSSGNWHCDSTWLGDRVITTSTRTWALPTYNNHLYKQISNGTSGGSTNDNTYFGYSTPWGYFDFNRFHCHFSPRDWQRLINNNWGFRPKRLSFKLFNIQVKEVTQNEGTKTIANNLTSTIQVFTDSEYQLPYVLGSAHQGCLPPFPADVFMIPQYGYLTLNNGSQAVGRSSFYCLEYFPSQMLRTGNNFSFSYTFEDVPFHSSYVHSQSLDRLMNPLIDQYLYYLSRTQSTGGTAGTQQLLFSQAGPSNMSAQARNWLPGPCYRQQRVSTTLSQNNNSNFAWTGATKYHLNGRDSLVNSGVAMATNKDDEDRFFPSSGILMFGKQGAGKDNVDYSNVMLTSEEEIKTTNPVATEQYGVVADNLQQQNTAPIVGAVNSQGALPGMVWQNRDVYLQGPIWAKIPHTDGNFHPSPLMGGFGLKHPPPQILIKNTPVPADPPTAFNQAKLNSFITQYSTGQVSVEIEWELQKENSKRWNPEIQYTSNYYKSTNVDFAVNTEGVYSEPRPIGTRYPTRNL

SEQ ID NO: 465 - DNA, 2217 bp, Adeno-associated virus
atggctgccgatggttatcttccagattggctcgaggacaacctctctgagggcattcgcgagtggtgggacctgaaacctggagccccgaaacccaaagccaaccagcaaaagcaggacgacggccggggtctggtgcttcctggctacaagtacctcggacccttcaacggactcgacaagggggagcccgtcaacgcggcggacgcagcggccctcgagcacgacaaggcctacgaccagcagctcaaagcgggtgacaatccgtacctgcggtataatcacgccgacgccgagtttcaggagcgtctgcaagaagatacgtcttttgggggcaacctcgggcgagcagtcttccaggccaagaagcgggttctcgaacctctcggtctggttgaggaaggcgctaagacggctcctggaaagaagagaccggtagagccgtcaccacagcgttcccccgactcctccacgggcatcggcaagaaaggccagcagcccgccagaaagagactcaatttcggtcagactggcgactcagagtcagtccccgaccctcaacctatcggagaacctccagcagcgccctctagtgtgggatctggtacaatggctgcaggcggtggcgcaccaatggcagacaataacgaaggtgccgacggagtgggtagttcctcgggaaattggcattgcgattccacatggctgggcgacagagtcatcaccaccagcacccgaacctgggccctgcccacctacaacaaccacctctacaagcaaatctccaacgggacctcgggaggcagcaccaacgacaacacctactttggctacagcaccccctgggggtattttgactttaacagattccactgccacttctcaccacgtgactggcagcgactcatcaacaacaactggggattccggcccaagagactcagcttcaagctcttcaacatccaggtcaaagaggtcacgcagaatgaaggcaccaagaccatcgccaataacctcaccagcaccatccaggtgtttacggactcggaataccagctgccgtacgtcctcggctctgcccaccagggctgcctgcctccgttcccggcggacgtcttcatgattcctcagtacggctacctgactctcaacaacggtagtcaggccgtgggacgttcctccttctactgcctggagtacttcccctctcagatgctgagaacgggcaacaacttttccttcagctacactttcgaggacgtgcctttccacagcagctacgtgcacagccagagtttggacaggctgatgaatcctctcatcgaccagtacctgtactacctgtcaagaacccagtctacgggaggcacagcgggaacccagcagttgctgttttctcaggccgggcctagcaacatgtcggctcaggccagaaactggctgcctggaccctgctacagacagcagcgcgtctccacgacactgtcgcaaaacaacaacagcaactttgcctggactggtgccaccaagtatcatctgaacggcagagactctctggtgaattcgggcgtcgccatggcaaccaacaaggacgacgaggaccgcttcttcccatccagcggcatcctcatgtttggcaagcagggagctggaaaagacaacgtggactatagcaacgtgatgctaaccagcgaggaagaaatcaagaccaccaaccccgtggccacagaacagtatggcgtggtggctgataacctacagcagcaaaacaccgctcctattgtgggggccgtcaacagccagggagccttacctggcatggtctggcagaaccgggacgtgtacctgcagggtcctatttgggccaagattcctcacacagatggcaactttcacccgtctcctttaatgggcggctttggacttaaacatccgcctcctcagatcctcatcaaaaacactcctgttcctgcggatcctccaacagcgttcaaccaggccaagctgaattctttcatcacgcagtacagcaccggacaagtcagcgtggagatcgagtgggagctgcagaaggagaacagcaagcgctggaacccagagattcagtatacttccaactactacaaatctacaaatgtggactttgctgttaatactgagggtgtttactctgagcctcgccccattggcactcgttaccccacccgtaatctgtaa

SEQ ID NO: 466 - protein, 734 aa, Adeno-associated virus; identical to SEQ ID NO: 291

SEQ ID NO: 467 - DNA, 2214 bp, Adeno-associated virus
atggctgctgacggttatcttccagattggctcgaggacaacctctctgagggcattcgcgagtggtgggacctgaaacctggagccccgaaacccaaagccaaccagcagaagcaggacgacggccggggtctggtgcttcctggctacaagtacctcggacccttcaacggactcgacaagggggagcccgtcaacgcggcggacgcagcggccctcgagcacgacaaggcctacgaccagcagctcaaagcgggtgacaatccgtacctgcggtataaccacgccgacgccgagtttcaggagcgtctgcaagaagatacgtcttttgggggcaacctcgggcgagcagtcttccaggccaagaagcgggttctcgaacctctcggtctggttgaggaagctgctaagacggctcctggaaagaagagaccggtagaaccgtcacctcagcgttcccccgactcctccacgggcatcggcaagaaaggccagcagcccgctagaaagagactgaactttgggcagactggcgactcagagtcagtccccgaccctcaacctctcggagaaccaccagcaggcccctctggtctgggatctggtacaatggctgcaggcggtggcgctccaatggcagacaataacgaaggcgccgacggagtgggtaatgcctcaggaaattggcattgcgattccacatggctgggcgacagagtcatcaccaccagcacccgaacctgggctttgcccacctacaacaaccacctctacaagcaaatctccagtcagtcagcaggtagcaccaacgacaacgtctacttcggctacagcaccccctgggggtattttgacttcaacagattccactgtcacttctcaccacgtgactggcagcgactcatcaacaacaactggggattccggcccaagaagctcaacttcaagctcttcaacatccaagtcaaggaggtcacgacgaatgacggcgtcacgaccatcgctaataaccttaccagcacggttcaggtcttttcggactcggagtaccagctgccgtacgtcctcggctctgcccaccagggctgcctgcctccgttcccggcggacgtcttcatgattcctcagtacggctacctgactctgaacaatggcagccaatcggtgggacgttcatccttctactgcctggaatacttcccttctcaggtgctgagaacgggtaacaacttcaccttcagttacaccttcgaggacgtgcctttccacagcagctacgcgcacagccagagcctagaccggctgatgaatcccctcatcgaccagtacctgtattacctggctagaacacagagtaacccaggaggcacatctggcaatcgggaactgcagttttaccagggcgggccttccaccatggccgaacaagccaagaactggttacctggaccttgcttccggcaacaaagagtttccaaaacactggatcaaaacaacaacagcaactttgcttggactggtgccaccaaatatcacctgaacggcagaaactcattggtgaatcctggtgtcgccatggcaactcacaaggacgacgaggaccgctttttcccatccagcggagtcctgatttttggaaaaactggagcaaccaacaagactacattggaaaacgtgttaatgacaaatgaagaagaaattcgtcctactaatcctgtggccacagaagaatacgggatagtcagcagcaatttacaagcggccaatactgcagcccagacacaagttgtcaacaaccagggagccttacctggcatggtctggcagaaccgggacgtgtacctgcagggtcccatctgggccaaaattcctcacacagacggcaactttcacccgtctccgctgatgggcggctttggactgaagcatccgcctcctcagatcctgatcaaaaacactcctgttcctgctaatcccccggaggtgtttacgcctgccaagtttgcttctttcatcacacagtacagcaccggccaggtcagcgtggagatcgagtgggagctgcagaaggagaacagcaagcgctggaacccagagattcagtatacctccaattttgacaaacagactggtgtggactttgccgttgacagccagggtgtttattctgagcctcgccccattggtactcgttacctcacccgtaatctgtaa

SEQ ID NO: 468 - protein, 737 aa, Adeno-associated virus
MAADGYLPDWLEDNLSEGIREWWDLKPGAPKPKANQQKQDDGRGLVLPGYKYLGPFNGLDKGEPVNAADAAALEHDKAYDQQLKAGDNPYLRYNHADAEFQERLQEDTSFGGNLGRAVFQAKKRVLEPLGLVEEAAKTAPGKKRPVEPSPQRSPDSSTGIGKKGQQPARKRLNFGQTGDSESVPDPQPLGEPPAGPSGLGSGTMAAGGGAPMADNNEGADGVGNASGNWHCDSTWLGDRVITTSTRTWALPTYNNHLYKQISSQSAGSTNDNVYFGYSTPWGYFDFNRFHCHFSPRDWQRLINNNWGFRPKKLNFKLFNIQVKEVTTNDGVTTIANNLTSTVQVFSDSEYQLPYVLGSAHQGCLPPFPADVFMIPQYGYLTLNNGSQSVGRSSFYCLEYFPSQVLRTGNNFTFSYTFEDVPFHSSYAHSQSLDRLMNPLIDQYLYYLARTQSNPGGTSGNRELQFYQGGPSTMAEQAKNWLPGPCFRQQRVSKTLDQNNNSNFAWTGATKYHLNGRNSLVNPGVAMATHKDDEDRFFPSSGVLIFGKTGATNKTTLENVLMTNEEEIRPTNPVATEEYGIVSSNLQAANTAAQTQVVNNQGALPGMVWQNRDVYLQGPIWAKIPHTDGNFHPSPLMGGFGLKHPPPQILIKNTPVPANPPEVFTPAKFASFITQYSTGQVSVEIEWELQKENSKRWNPEIQYTSNFDKQTGVDFAVDSQGVYSEPRPIGTRYLTRNL

SEQ ID NO: 469 - DNA, 2214 bp, Adeno-associated virus
atggctgccgatggttatcttccagattggctcgaggacaacctctctgagggcattcgcgagtggtgggacctgaaacctggagccccgaaacccaaagccaaccagcaaaagcaggacgacggccggggtctggtgcttcctggctacaagtacctcggacccttcaacggactcgacaagggggagcccgtcaacgcggcggacgcagcggccctcgagcacgacaaggcctacgaccagcagctcaaagcgggtgacaatccgtacctgcggtataatcacgccgacgccgagtttcaggagcgtctgcaagaagatacgtcttttgggggcaacctcgggcgagcagtcttccaggccaagaagcgggttctcgaacctctcggtctggttgaggaaggcgctaagacggctcctggaaagaagagaccggtagagccgtcaccacagcgttcccccgactcctccacgggcatcggcaagaaaggccagcagcccgccagaaagagactcaatttcggtcagactggcgactcagagtcagtccccgaccctcaacctatcggagaacctccagcagcgccctctagtgtgggatctggtacaatggctgcaggcggtggcgcaccaatggcagacaataacgaaggtgccgacggagtgggtagttcctcgggaaattggcattgcgattccacacggctgggcgacagagtcatcaccaccagcacccggacctgggctttgcccacctacaacaaccacctctacaagcaaatctccagtcagtcagcaggtagcaccaacgacaacgtctacttcggctacagcaccccctgggggtattttgacttcaacagattccactgtcacttctcaccacgtgactggcagcggctcatcaacaacaactggggattccggcccaagaagctcaacttcaagctgttcaacatccaggtcaaggaggtcacaacgaatgacggcgtcacgaccatcgccaataaccttaccagcacggttcaggtcttttcggactcggaataccagctgccctacgtcctcggctccgcacaccagggctgcctgcctccgttcccggcggacgtcttcatgattccccagtacggctacctgactctgaacaatggcagccaatcggtgggtcgttcctctttctactgcctggaatatttcccttctcaaatgctgagaacgggcaacaacttcaccttcagctacaccttcgaggacgttcccttccacagcagctacgcacacagccagagcctggaccggctgatgaatcctcttatcgaccagtacctgtattacctggccagaacacagagcaacgcaggaggcacagctggcaatcgggaactgcagttttatcagggcgggcctaccaccatggccgaacaagccaaaaactggctgcctggaccttgcttccggcaacgaagagtctccaagacgctggatcaaaacaacaacagcaactttgcttggactggtgccaccaaataccatctaaatggaagaaattcattggttaatcccggtgtcgccatggcaacccacaaggacgacgaggaacgcttcttcccttcgagcggagtcctgatttttggaaaaactggagcagctaataagactacactggaaaatgtgttaatgacaaatgaagaggaaattcgtcctaccaacccggtagccaccgaggaatacgggactgttagcagcaacctgcaggcggctaacactgcagcccagacacaagttgtcaacaaccagggagccttacctggtatggtctggcagaaccgggacgtgtacctgcagggtcccatctgggccaagattcctcacacggacggcaactttcacccgtctccgctgatgggcggctttggactgaagcatccgcctcctcagatcctgatcaaaaacactcctgttcctgctaatcccccggaggtgtttacgcctgccaagtttgcttctttcatcacacagtacagcaccggccaggtcagcgtggagatcgagtgggagctgcagaaggagaacagcaagcgctggaacccagagattcagtatacctccaattttgacaaacagactggtgtggactttgccgttgacagccagggtgtttattctgagcctcgccccattggtactcgttacctcacccgtaatctgtaa

SEQ ID NO: 470 - protein, 737 aa, Adeno-associated virus
MAADGYLPDWLEDNLSEGIREWWDLKPGAPKPKANQQKQDDGRGLVLPGYKYLGPFNGLDKGEPVNAADAAALEHDKAYDQQLKAGDNPYLRYNHADAEFQERLQEDTSFGGNLGRAVFQAKKRVLEPLGLVEEGAKTAPGKKRPVEPSPQRSPDSSTGIGKKGQQPARKRLNFGQTGDSESVPDPQPIGEPPAAPSSVGSGTMAAGGGAPMADNNEGADGVGSSSGNWHCDSTRLGDRVITTSTRTWALPTYNNHLYKQISSQSAGSTNDNVYFGYSTPWGYFDFNRFHCHFSPRDWQRLINNNWGFRPKKLNFKLFNIQVKEVTTNDGVTTIANNLTSTVQVFSDSEYQLPYVLGSAHQGCLPPFPADVFMIPQYGYLTLNNGSQSVGRSSFYCLEYFPSQMLRTGNNFTFSYTFEDVPFHSSYAHSQSLDRLMNPLIDQYLYYLARTQSNAGGTAGNRELQFYQGGPTTMAEQAKNWLPGPCFRQRRVSKTLDQNNNSNFAWTGATKYHLNGRNSLVNPGVAMATHKDDEERFFPSSGVLIFGKTGAANKTTLENVLMTNEEEIRPTNPVATEEYGTVSSNLQAANTAAQTQVVNNQGALPGMVWQNRDVYLQGPIWAKIPHTDGNFHPSPLMGGFGLKHPPPQILIKNTPVPANPPEVFTPAKFASFITQYSTGQVSVEIEWELQKENSKRWNPEIQYTSNFDKQTGVDFAVDSQGVYSEPRPIGTRYLTRNL

SEQ ID NO: 471 - DNA, 2208 bp, Adeno-associated virus
atggctgccgatggttatcttccagattggctcgaggacactctctctgaaggaataagacagtggtggaagctcaaacctggcccaccaccaccaaagcccgcagagcggcataaggacgacagcaggggtcttgtgcttcctgggtacaagtacctcggacccttcaacggactcgacaagggggagccggtcaacgaggcagacgccgcggccctcgagcacgacaaggcctacgaccggcagctcgacagcggagacaacccgtacctcaagtacaaccacgccgacgcggagtttcaggagcgtcttaaagaagatacgtcttttgggggcaacctcggacgagcagtcttccaggcgaaaaagagggttcttgaacctctgggcctggttgaggaacctgttaagacggctccgggaaaaaagaggccggtagagcactctcctgcggagccagactcctcctcgggaaccggaaaagcgggccagcagcctgcaagaaaaagattgaattttggtcagactggagacgcagactccgtacctgacccccagcctctcggacagccaccagcagccccctctggtttgggatctactacaatggctacaggcagtggcgcaccaatggcagacaataacgagggtgccgatggagtgggtaattcttcaggaaattggcattgcgattcccaatggctgggcgacagagtcatcaccaccagcacccgaacctgggcccagcccacctacaacaaccacctctacaagcaaatctcaagccaatcaggagcctcaaacgacaaccactactttggctacagcaccccttgggggtattttgacttcaacagattccactgccacttttcaccacgtgactggcaaagactcatcaacaacaactggggattccgacccaagagactcaacttcaagctctttaacattcaagtcaaagaggtcacgcagaatgacggtacgacgacgattgccaataaccttaccagcacggttcaggtgtttactgactcggagtaccagctcccgtacgtcctcgggtcggcgcatcaaggatgcctcccgccgtttccagcggacgtcttcatggtcccacagtatggatacctcaccctgaacaacgggagtcaggcggtaggacgctcttccttttactgcctggagtactttccttctcagatgcttcgtactggaaacaactttcagttcagctacacctttgaagacgttcctttccacagcagctacgctcacagccagagtctggatcggctgatgaatcctctgatcgaccagtacctgtattatctgaacaaaacacaatcaaatagtggagctcttcagcagtctcggctactgtttagtcaagctggacccaccagcatgtctcttcaagctaaaaactggctacctggaccttgctacagacagcagcgtctgtcaaagcaggcaaacgacaacaacaacagcaactttccctggactgcggctacaaagtaccacctaaatggccgggactcgttggttaatccaggaccagctatggccagtcacaaagacgatgaagaaaagtttttccccatgcatggaaccctgatatttggtaaacaaggaacaaatgctaacgacgcggatttggacaatgtcatgattacagatgaagaagaaatccgcaccaccaatcccgtggctacggagcagtacggatatgtgtcaaataatttgcaaaactcaaatactggtccaactactggaactgtcaatcaccgaggagcgttacctggcatggtgtggcaggatcgagacgtgtacctgcagggacccatttgggccaagattcctcacaccgatggacactttcatccttctccactgatgggaggttttgggctcaaacacccgcctcctcagatcatgatcaaaaacactcccgttccagccaatcctcccacaaacttcagttctgccaagtttgcttctttcatcacacagtattccacggggcaggtcagcgtggagatcgagtgggagctgcagaaagagaacagcaaacgctggaatcccgaaattcagtacacttccaactacaacaaatctgttaatgtggactttactgtggacactaatggcgtgtattcagagcctcgccccattggcaccagatacctgactcgtaatctgtaa

SEQ ID NO: 472 - protein, 735 aa, Adeno-associated virus
MAADGYLPDWLEDTLSEGIRQWWKLKPGPPPPKPAERHKDDSRGLVLPGYKYLGPFNGLDKGEPVNEADAAALEHDKAYDRQLDSGDNPYLKYNHADAEFQERLKEDTSFGGNLGRAVFQAKKRVLEPLGLVEEPVKTAPGKKRPVEHSPAEPDSSSGTGKAGQQPARKRLNFGQTGDADSVPDPQPLGQPPAAPSGLGSTTMATGSGAPMADNNEGADGVGNSSGNWHCDSQWLGDRVITTSTRTWAQPTYNNHLYKQISSQSGASNDNHYFGYSTPWGYFDFNRFHCHFSPRDWQRLINNNWGFRPKRLNFKLFNIQVKEVTQNDGTTTIANNLTSTVQVFTDSEYQLPYVLGSAHQGCLPPFPADVFMVPQYGYLTLNNGSQAVGRSSFYCLEYFPSQMLRTGNNFQFSYTFEDVPFHSSYAHSQSLDRLMNPLIDQYLYYLNKTQSNSGALQQSRLLFSQAGPTSMSLQAKNWLPGPCYRQQRLSKQANDNNNSNFPWTAATKYHLNGRDSLVNPGPAMASHKDDEEKFFPMHGTLIFGKQGTNANDADLDNVMITDEEEIRTTNPVATEQYGYVSNNLQNSNTGPTTGTVNHRGALPGMVWQDRDVYLQGPIWAKIPHTDGHFHPSPLMGGFGLKHPPPQIMIKNTPVPANPPTNFSSAKFASFITQYSTGQVSVEIEWELQKENSKRWNPEIQYTSNYNKSVNVDFTVDTNGVYSEPRPIGTRYLTRNL

SEQ ID NO: 473 - DNA, 2217 bp, Adeno-associated virus
atggctgccgatggttatcttccagattggctcgaggacaacctctctgagggcattcgcgagtggtgggcgctgaaacctggagccccgaagcccaaagccaaccagcaaaagcaggacgacggccggggtctggtgcttcctggctacaagtacctcggacccttcaacggactcgacaagggggagcccgtcaacgcggcggacgcagcggccctcgagcacgacaaggcctacgaccagcagctgcaggcgggtgacaatccgtacctgcggtataatcacgccgacgccgagtttcaggagcgtctgcaagaagatacgtcttttgggggcaacctcgggcgagcagtcttccaggccaagaagcgggttctcgaacctctcggtctggttgaggaaggcgctaagacggctcctggaaagaagagaccggtagagccgtcaccacagcgttcccccgactcctccacgggcatcggcaagaaaggccagcagcccgccagaaagagactcaatttcggtcagactggcgactcagagtcagtccccgaccctcaacctatcggagaacctccagcagcgccctctagtgtgggatctggtacaatggctgcaggcggtggcgcgccaatggcagacaataacgaaggtgccgacggagtgggtagttcctcgggaaattggcattgcgattccacatggctgggcgacagagtcatcaccaccagcacccgaacctgggccctgcccacctacaacaaccacctctacaagcaaacctccaacgggacctcgggaggcagcaccaacgacaacacctactttggctacagcaccccctgggggtattttgactttaacagattccactgccacttctcaccacgtgactggcagcgactcatcaacaacaactggggattccggcccaagagactcagcttcaagctcttcaacatccaggtcaaagaggtcacgcagaatgaaggcaccaagaccatcgccaataacctcaccagcaccatccaggtgtttacggactcggaataccagctgccgtacgtcctcggctctgcccaccagggctgcctgcctccgttcccggcggacgtcttcatgattcctcagtacggctacctgactctcaacaacggtagtcaggccgtgggacgttcctccttctactgcctggagtacttcccctctcagatgctgagaacgggcaacaacttttccttcagctacactttcgaggacgtgcctttccacagcagctacgcgcacagccagagtttggacaggctgatgaatcctctcatcgaccagtacctgtactacctgtcaagaacccagtctacgggaggcacagcgggaacccagcagttgctgttttctcaggccgggcctagcaacatgtcggctcaggccagaaactggctgcctggaccctgctacagacagcagcgcgtctccacgacactgtcgcaaaacaacaacagcaactttgcctggactggtgccaccaagtatcatctgaacggcagagactctctggtgaatccgggcgtcgccatggcaaccaacaaggacgacgaggaccgcttcttcccatccagcggcatcctcatgtttggcaagcagggagctggaaaagacaacgtggactatagcaacgtgatgctaaccagcgaggaagaaatcaagaccaccaaccccgtggccacagaacagtatggcgtggtggctgataacctacagcagcaaaacaccgctcctattgtgggggccgtcaacagccagggagccttacctggcatggtctggcagaaccgggacgtgtacctgcagggtcctatttgggccaagattcctcacacagatggcaactttcacccgtctcctttaatgggcggctttggacttaaacatccgcctcctcagatcctcatcaaaaacactcctgttcctgcggatcctccaacagcgttcaaccaggccaagctgaattctttcatcacgcagtacagcaccggacaagtcagcgcggagatcgagtgggagctgcagaaggagaacagcaagcgctggaacccagagattcagtatacttccaactactacaaatctacaaatgtggactttgctgttaatactgagggtgtttactctgagcctcgccccattggcactcgttacctcacccgtaatctgtaa

SEQ ID NO: 474 - protein, 738 aa, Adeno-associated virus
MAADGYLPDWLEDNLSEGIREWWALKPGAPKPKANQQKQDDGRGLVLPGYKYLGPFNGLDKGEPVNAADAAALEHDKAYDQQLQAGDNPYLRYNHADAEFQERLQEDTSFGGNLGRAVFQAKKRVLEPLGLVEEGAKTAPGKKRPVEPSPQRSPDSSTGIGKKGQQPARKRLNFGQTGDSESVPDPQPIGEPPAAPSSVGSGTMAAGGGAPMADNNEGADGVGSSSGNWHCDSTWLGDRVITTSTRTWALPTYNNHLYKQTSNGTSGGSTNDNTYFGYSTPWGYFDFNRFHCHFSPRDWQRLINNNWGFRPKRLSFKLFNIQVKEVTQNEGTKTIANNLTSTIQVFTDSEYQLPYVLGSAHQGCLPPFPADVFMIPQYGYLTLNNGSQAVGRSSFYCLEYFPSQMLRTGNNFSFSYTFEDVPFHSSYAHSQSLDRLMNPLIDQYLYYLSRTQSTGGTAGTQQLLFSQAGPSNMSAQARNWLPGPCYRQQRVSTTLSQNNNSNFAWTGATKYHLNGRDSLVNPGVAMATNKDDEDRFFPSSGILMFGKQGAGKDNVDYSNVMLTSEEEIKTTNPVATEQYGVVADNLQQQNTAPIVGAVNSQGALPGMVWQNRDVYLQGPIWAKIPHTDGNFHPSPLMGGFGLKHPPPQILIKNTPVPADPPTAFNQAKLNSFITQYSTGQVSAEIEWELQKENSKRWNPEIQYTSNYYKSTNVDFAVNTEGVYSEPRPIGTRYLTRNL

SEQ ID NO: 475 - DNA, 2217 bp, Adeno-associated virus
atggctgctgacggttatcttccagattggctcgaggacaacctctctgagggcattcgcgagtggtgggacctgaaacctggagcccccaagcccaaggccaaccagcagaagcaggacgacggccggggtctggtgcttcctggctacaagtacctcggacccttcaacggactcgacaagggggagcccgtcaacgcggcggacgcagcggccctcgagcacgacaaggcctacgaccagcagctcaaagcgggtgacaatccgtacctgcggtataatcacgccgacgccgagtttcaggagcgtctgcaagaagatacgtcttttgggggcaacctcgggcgagcagtcttccaggccaagaagcgggttctcgaacctctcggtctggttgaggaagctgctaagacggctcctggaaagaagagaccggtagaaccgtcacctcagcgttcccccgactcctccacgggcatcggcaagaaaggccagcagcccgctagaaagagactgaactttgggcagactggcgactcagagtcagtccccgaccctcaaccaatcggagaacctccagcagcgccctctagtgtgggatctggtacaatggccgcaggcggtggcgcaccaatggcagacaataacgaaggtgccgacggagtgggtagttcctcgggaaattggcattgcgattccacatggctgggcgacagagtcatcaccaccagcacccgaacctgggccctgcccacctacaacaaccacctctacaagcaaatctccaacgggacctcgggaggcagcaccaacgacaacacctactttggctacagcaccccctgggggtattttgactttaacagattccactgccacttctcaccacgtgactggcagcgactcatcaacaacaactggggattccggcccaagagactcagcttcaagctcttcaacatccaggtcaaagaggtcacgcagaatgaaggcaccaagaccatcgccaataacctcaccagcaccatccaggtgtttacggactcggaataccagctgccgtacgtcctcggctctgcccaccagggctgcctgcctccgttcccggcggacgtcttcatgattcctcagtacggctacctgactctcaacaacggtagtcaggccgtgggacgttcctccttctactgcctggagtacttcccctctcagatgctgagaacgggcaacaacttttccttcagctacactttcgaggacgtgcctttccacagcagctacgcgcacagccagagtttggacaggctgatgaatcctctcatcgaccagtacctgtactacctgtcaagaacccagtctacgggaggcacagcgggaacccagcagctgctgttttctcaggccgggcctagcaacatgtcggctcaggccagaaactggctgcctggaccctgctacagacagcagcgcgtctccacgacactgtcgcaaaacaacaacagcaactttgcctggactggtgccaccaagtatcatctgaacggcagagactctctggtgaatccgggcgtcgccatggcaaccaacaaggacgacgaggaccgcttcttcccatccagcggcatcctcatgtttggcaagcagggagctggaaaagacaacgtggactatagcaacgtgatgctaaccagcgaggaagaaatcaagaccaccaaccccgtggccacagaacagtatggcgtggtggctgataacctacagcagcaaaacaccgctcctattgtgggggccgtcaacagccagggagccttacctggcatggtctggcagaaccgggacgtgtacctgcagggtcctatttgggccaagattcctcacacagatggcaactttcacccgtctcctttaatgggcggctttggacttaaacatccgcctcctcagatcctcatcaaaagcactcctgttcctgcggatcctccaacagcgttcaaccaggccaagctgaattctttcatcacgcagtacagcaccggacaagtcagcgtggagatcgagtgggagctgcagaaggagaacagcaagtgctggaacccagagattcagtatacttccaactactacaaatctacaaatgtggactttgctgttaatactgagggtgtttactctgagcctcgccccattggcactcgttacctcacccgtaatctgtaa

SEQ ID NO: 476 - protein, 738 aa, Adeno-associated virus
MAADGYLPDWLEDNLSEGIREWWDLKPGAPKPKANQQKQDDGRGLVLPGYKYLGPFNGLDKGEPVNAADAAALEHDKAYDQQLKAGDNPYLRYNHADAEFQERLQEDTSFGGNLGRAVFQAKKRVLEPLGLVEEAAKTAPGKKRPVEPSPQRSPDSSTGIGKKGQQPARKRLNFGQTGDSESVPDPQPIGEPPAAPSSVGSGTMAAGGGAPMADNNEGADGVGSSSGNWHCDSTWLGDRVITTSTRTWALPTYNNHLYKQISNGTSGGSTNDNTYFGYSTPWGYFDFNRFHCHFSPRDWQRLINNNWGFRPKRLSFKLFNIQVKEVTQNEGTKTIANNLTSTIQVFTDSEYQLPYVLGSAHQGCLPPFPADVFMIPQYGYLTLNNGSQAVGRSSFYCLEYFPSQMLRTGNNFSFSYTFEDVPFHSSYAHSQSLDRLMNPLIDQYLYYLSRTQSTGGTAGTQQLLFSQAGPSNMSAQARNWLPGPCYRQQRVSTTLSQNNNSNFAWTGATKYHLNGRDSLVNPGVAMATNKDDEDRFFPSSGILMFGKQGAGKDNVDYSNVMLTSEEEIKTTNPVATEQYGVVADNLQQQNTAPIVGAVNSQGALPGMVWQNRDVYLQGPIWAKIPHTDGNFHPSPLMGGFGLKHPPPQILIKSTPVPADPPTAFNQAKLNSFITQYSTGQVSVEIEWELQKENSKCWNPEIQYTSNYYKSTNVDFAVNTEGVYSEPRPIGTRYLTRNL

SEQ ID NO: 477 - protein, 738 aa, Adeno-associated virus
MAADGYLPDWLEDNLSEGIREWWDLKPGAPKPKANQQKQDDGRGLVLPGYKYLGPFNGLDKGEPVNAADAAALEHDKAYDQQLKAGDNPYLRYNHADAEFQERLQEDTSFGGNLGRAVFQAKKRVLEPLGLVEEAAKTAPGKKRPVEPSPQRSPDSSTGIGKKGQQPARKRLNFGQTGDSESVPDPQPIGEPPAAPSSVGSGTMAAGGGAPMADNNEGADGVGSSSGNWHCDSTWLGDRVITTSTRTWALPTYNNHLYKQISNGTSGGSTNDNTYFGYSTPWGYFDFNRFHCHFSPRDWQRLINNNWGFRPKRLSFKLFNIQVKEVTQNEGTKTIANNLTSTIQVFTDSEYQLPYVLGSAHQGCLPPFPADVFMIPQYGYLTLNNGSQAVGRSSFYCLEYFPSQMLRTGNNFSFSYTFEDVPFHSSYAHSQSLDRLMNPLIDQYLYYLSRTQSTGGTAGTQQLLFSQAGPSNMSAQARNWLPGPCYRQQRVSTTLSQNNNSNFAWTGATKYHLNGRDSLVNPGVAMATNKDDEDRFFPSSGILMFGKQGAGKDNVDYSNVMLTSEEEIKTTNPVATEQYGVVADNLQQQNTAPIVGAVNSQGALPGMVWQNRDVYLQGPIWAKIPHTDGNFHPSPLMGGFGLKHPPPQILIKSTPVPADPPTAFNQAKLNSFITQYSTGQVSVEIEWELQKENSKRWNPEIQYTSNYYKSTNVDFAVNTEGVYSEPRPIGTRYLTRNL

SEQ ID NO: 478 - DNA, 2217 bp, Adeno-associated virus
atggctgctgacggttatcttccagattggctcgaggacaacctctctgagggcattcgcgagtggtgggacctgaaacctggagcccccaagcccaaggccaaccagcagaagcaggacgacggccggggtctggtgcttcctggctacaagtacctcggacccttcaacggactcgacaagggggagcccgtcaacgcggcggacgcagcggccctcgagcacgacaaggcctacgaccagcagctcaaagcgggtgacaatccgtacctgcggtataaccacgccgacgccgagtttcaggagcgtctgcaagaagatacgtcttttgggggcaacctcgggcgagcagtcttccaggccaagaagcgggttctcgaacctctcggtctggttgaggaagctgctaagacggctcctggaaagaagagaccggtagaaccgtcacctcagcgttcccccgactcctccacgggcatcggcaagaaaggccagcagcccgctagaaagagactgaactttgggcagactggcgactcagagtcagtccccgaccctcaaccaatcggagaaccaccagcaggcccctctggtctgggatctggtacaatggctgcaggcggtggcgcaccaatggctgacaataacgagggcgccgacggagtgggtaatgcctcaggaaattggcattgcgattccacatggctgggcgacagagtcatcaccaccagcacccgaacctgggctttgcccacctacaacaaccacctctacaagcaaatctccagtcagtcagcaggtagcaccaacgacaacgtctacttcggctacagcaccccctgggggtattttgacttcaacagattccactgtcacttctcaccacgtgactggcagcggctcatcaacaacaactggggattccggcccaagaagctcaacttcaagctgttcaacatccaggtcaaggaggtcacaacgaatgacggcgtcacgaccatcgccaataaccctaccagcacggttcaggtcttttcggactcggaataccagctgccctacgtcctcggctccgcacaccagggctgcctgcctccgttcccggcggacgtcttcatgattccccagtacggctacctgactctgaacaatggcagccaatcggtgggtcgttcctctttctactgcctggaatatttcccttctcaaatgctgagaacgggcaacaacttcaccttcagctacaccttcgaggacgttcccttccacagcagctacgcacacagccagagcctggaccggctgatgaatcctcttatcgaccagtacctgtattacctggccagaacacagagcaacgcaggaggcacagctggcaatcgggaactgcagttttatcagggcgggcctaccaccatggccgaacaagccaaaaactggctgcctggaccctgctacagacagcagcgcgtctccacgacactgtcgcaaaacaacaacagcaactttgcctggactggtgccaccaagtatcatctgaacggcagagactctctggtgaatccgggcgtcgccatggcaaccaacaaggacgacgaggaccgcttcttcccatccagcggcatcctcatgtttggcaagcagggagctggaaaagacaacgtggactatagcaacgtgatgctaaccagcgaggaagaaatcaagaccaccaaccccgtggccacagaacagtatggcgtggtggctgataacctacagcagcaaaacaccgctcctattgtgggggccgtcaacagccagggagccttacctggcatggtctggcagaaccgggacgtgtacctgcagggtcctatttgggccaagattcctcacacagatggcaactttcacccgtctcctttaatgggcggctttggacttaaacatccgcctcctcagatcctcatcaaaaacactcctgttcctgcggatcctccaacagcgttcaaccaggccaagctgaattctttcatcacgcagtacagcaccggacaagtcagcgtggagatcgagtgggagctgcagaaggagaacagcaagcgctggaacccagagattcagtatacttccaactactacaaatctacaaatgtggactttgctgttaatactgagggtgtttactctgagcctcgccccattggcactcgttacctcacccgtaatctgtaa

SEQ ID NO: 479 - protein, 738 aa, Adeno-associated virus
MAADGYLPDWLEDNLSEGIREWWDLKPGAPKPKANQQKQDDGRGLVLPGYKYLGPFNGLDKGEPVNAADAAALEHDKAYDQQLKAGDNPYLRYNHADAEFQERLQEDTSFGGNLGRAVFQAKKRVLEPLGLVEEAAKTAPGKKRPVEPSPQRSPDSSTGIGKKGQQPARKRLNFGQTGDSESVPDPQPIGEPPAGPSGLGSGTMAAGGGAPMADNNEGADGVGNASGNWHCDSTWLGDRVITTSTRTWALPTYNNHLYKQISSQSAGSTNDNVYFGYSTPWGYFDFNRFHCHFSPRDWQRLINNNWGFRPKKLNFKLFNIQVKEVTTNDGVTTIANNPTSTVQVFSDSEYQLPYVLGSAHQGCLPPFPADVFMIPQYGYLTLNNGSQSVGRSSFYCLEYFPSQMLRTGNNFTFSYTFEDVPFHSSYAHSQSLDRLMNPLIDQYLYYLARTQSNAGGTAGNRELQFYQGGPTTMAEQAKNWLPGPCYRQQRVSTTLSQNNNSNFAWTGATKYHLNGRDSLVNPGVAMATNKDDEDRFFPSSGILMFGKQGAGKDNVDYSNVMLTSEEEIKTTNPVATEQYGVVADNLQQQNTAPIVGAVNSQGALPGMVWQNRDVYLQGPIWAKIPHTDGNFHPSPLMGGFGLKHPPPQILIKNTPVPADPPTAFNQAKLNSFITQYSTGQVSVEIEWELQKENSKRWNPEIQYTSNYYKSTNVDFAVNTEGVYSEPRPIGTRYLTRNL

SEQ ID NO: 480 - DNA, 2208 bp, Adeno-associated virus
atggctgccgatggttatcttccagattggctcgaggacaacctctctgagggcattcacgagtggtgggacccgaaacctggagccccgaaacccaaagccaaccagcaaaagcaggacgacggccggggtctggtgcttcctggctacaagtacctcggacccttcaacggactcgacaagggggagcccgtcaacgcggcggacgcagcggccctcgagcacgacaaggcctacgaccagcagctcaaagcgggtgacaatccgtacctgcggtataatcacgccgacgccgagtttcaggagcgtctgcaagaagatacgtcttttgggggcaacctcgggcgagcagtcttccaggccaagaagcgggttctcgaacctctcggtctggttgaggaaggcgctaagacggctcctggaaagaagagaccggtagagccgtcaccacagcgttcccccgactcctccacgggcatcggcaagaaaggccagcagcccgccagaaagagactcaatttcggtcagactggcgactcagagtcagtccccgaccctcaacctatcggagaacctccagcagcgccctctagtgtgggatctggtacaatggctgcaggcggtggcgcaccaatggcagacaataacgaaggtgccgacggagtgggtagttcctcgggaaattggcattgcgattccacatggctgggcgacagagtcatcaccaccagcacccgaacctgggccctgcccacccacaacaaccacctctacaagcaaatctccaacgggacctcgggaggcagcaccaacgacaacgtctacttcggctacagcaccccctgggggtattttgacttcaacagattccactgtcacttctcaccacgtgaccggcagcgactcatcaacaacaactggggattccggcccaagagactcagcttcaagctcttcaacatccaggtcaaagaggtcacgcagaatgaaggcaccaagaccatcgccaataacctcaccagcaccatccaggtgtttacggactcggaataccagctgccgtacgtcctcggctctgcccaccagggctgcctgcctccgttcccggcggacgtcttcatgattcctcagtacggctacctgactctcaacaacggtagtcaggccgtgggacgttcctccttctactgcctggagtacttcccctctcagatgctgagaacgggcaacaacttttccttcagctacactttcgaggacgtgcctttccacagcagctacgcgcacagccagagtttggacaggctgatgaatcctctcatcgaccagtacctgtactacctgtcaagaacccagtctacggaaggcacagcgggaacccagcagttgctgttttctcaggccgggcctagcaacatgtcggctcaggccagaaactggctgcctggaccctgctacagacagcagcgcgtctccacgacactgtcgcaaaacaacaacagcaactttgcctggactggtgccaccaagtatcatctgaacggcagagactctctggtgaatccgggcgtcgccatggcaacccacaaggacgacgaggaacgcttcttcccttcgagcggagtcctgatttttggaaaaactggagcagctaataagactacactggaaaatgtgttaatgacaaatgaagaggaaattcgtcctaccaacccggtagccaccgaggaatacgggactgttagcagcaacctgcaggcggctaacactgcagcccagacacaagttgtcaacaaccagggagccttacctggtatggtctggcagaaccgggacgtgtacctgcagggtcccatctgggccaagattcctcacacggacggcaactttcacccgtctccgctgatgggcggctttggactgaagcatcctcagatcctgatcaaaaacactcctgttcctgctaatcccccggaggtgtttacgcctgccaagtttgcttctttcatcacacagtacagcaccggccaggtcagcgtggagatcgagtgggagctgcagaaggagaacagcaagcgctggaacccagagattcagtatacctccaattttgacaaacagactggtgtggactttgccgttgacagccagggtgtttattctgagcctcgccccattggtactcgttacctcacccgtaatctgtaa

SEQ ID NO: 481 - protein, 735 aa, Adeno-associated virus
MAADGYLPDWLEDNLSEGIHEWWDPKPGAPKPKANQQKQDDGRGLVLPGYKYLGPFNGLDKGEPVNAADAAALEHDKAYDQQLKAGDNPYLRYNHADAEFQERLQEDTSFGGNLGRAVFQAKKRVLEPLGLVEEGAKTAPGKKRPVEPSPQRSPDSSTGIGKKGQQPARKRLNFGQTGDSESVPDPQPIGEPPAAPSSVGSGTMAAGGGAPMADNNEGADGVGSSSGNWHCDSTWLGDRVITTSTRTWALPTHNNHLYKQISNGTSGGSTNDNVYFGYSTPWGYFDFNRFHCHFSPRDRQRLINNNWGFRPKRLSFKLFNIQVKEVTQNEGTKTIANNLTSTIQVFTDSEYQLPYVLGSAHQGCLPPFPADVFMIPQYGYLTLNNGSQAVGRSSFYCLEYFPSQMLRTGNNFSFSYTFEDVPFHSSYAHSQSLDRLMNPLIDQYLYYLSRTQSTEGTAGTQQLLFSQAGPSNMSAQARNWLPGPCYRQQRVSTTLSQNNNSNFAWTGATKYHLNGRDSLVNPGVAMATHKDDEERFFPSSGVLIFGKTGAANKTTLENVLMTNEEEIRPTNPVATEEYGTVSSNLQAANTAAQTQVVNNQGALPGMVWQNRDVYLQGPIWAKIPHTDGNFHPSPLMGGFGLKHPQILIKNTPVPANPPEVFTPAKFASFITQYSTGQVSVEIEWELQKENSKRWNPEIQYTSNFDKQTGVDFAVDSQGVYSEPRPIGTRYLTRNL

SEQ ID NO: 482 - protein, 738 aa, Adeno-associated virus
MAADGYLPDWLEDNLSEGIREWWDLKPGAPKPKANQQKQDDGRGLVLPGYKYLGPFNGLDKGEPVNAADAAALEHDKAYDQQLKAGDNPYLRYNHADAEFQERLQEDTSFGGNLGRAVFQAKKRVLEPLGLVEEGAKTAPGKKRPVEPSPQRSPDSSTGIGKKGQQPARKRLNFGQTGDSESVPDPQPIGEPPAAPSSVGSGTMAAGGGAPMADNNEGADGVGSSSGNWHCDSTWLGDRVITTSTRTWALPTYNNHLYKQISNGTSGGSTNDNTYFGYSTPWGYFDFNRFHCHFSPRDWQRPINNNWGFRPKRLSFKLFNIQVKEVTQNEGTKTIANNLTSTIQVFTDSEYQLPYVLGSAHQGCLPPFPADVFMIPQYGYLTLNNGSQAVGRSSFYCLEYFPSQMLRTGNNFSFSYPFEDVPFHSSYAHSQSLDRLMNPLIDQYLYYLSRTQSTGGTAGTQQLLFSQAGPSNMSAQARNWLPGPCYRQQRVSTTLSQNNNSNFAWTGATKYHLNGRDSLVNPGVAMATNKDDEDRFFPSSGILMFGKQGAGKDNVDYSNVMLTSEEEIKTTNPVATEQYGVVADNLQQQDTAPIVGAVNSQGALPGMVWQNRDVYLQGPIWAKIPHTDGNFHPSPLMGGFGLKHPPPQVLIKNTPVPADPPTAFNQAKLNSFITQYSTGQVSVEIEWELQKENSKRWNPEIQYTSNYYKSTNVDFAVNTEGVYSEPRPIGTRYLTRNL

SEQ ID NO: 483 - DNA, 2217 bp, Adeno-associated virus
atggctgccgatggttatcttccagattggctcgaggacaacctctctgagggcattcgcgagtggtgggacctgaaacctggagccccgaaacccaaggccaaccagcaaaagcaggacgacggccggggtctggtgcttcctggctacaagtacctcggacccttcaacggactcgacaagggggagcccgtcaacgcggcggacgcagcggccctcgagcacgacaaggcctacgaccagcagctcaaagcgggtgacaatccgtacctgcggtataatcacgccgacgccgagtttcaggagcgtctgcaagaagatacgtcttttgggggcaacctcgggcgagcagtcttccaggccaagaagcgggttctcgaacctctcggtctggttgaggaaggcgctaagacggctcctggaaagaagagaccggtagagccgtcaccacagcgttcccccgactcctccacgggcatcggcaagaaaggccagcagcccgccagaaagagactcaatttcggtcagactggcgactcagagtcagtccccgaccctcaacctatcggagaacctccagcagcgccctctagtgtgggatctggtacaatggctgcaggcggtggcgcaccaatggcagacaataacgaaggtgccgacggagtgggtagttcctcgggaaattggcattgcgattccacatggctgggcgacagagtcatcaccaccagcacccgaacctgggccctgcccacctacaacaaccacctctacaagcaaatctccaacgggacctcgggaggcagcaccaacgacaacacctactttggctacagcaccccctgggggtattttgactttaacagattccactgccacttctcaccacgtgactggcagcgacccatcaacaacaactggggattccggcccaagagactcagcttcaagctcttcaacatccaggtcaaagaggtcacgcagaatgaaggcaccaagaccatcgccaataacctcaccagcaccatccaggtgtttacggactcggaataccagctgccgtacgtcctcggctctgcccaccagggctgcctgcctccgttcccggcggacgtcttcatgattcctcagtacggctacctgactctcaacaacggtagtcaggccgtgggacgttcctccttctactgcctggagtacttcccctctcagatgctgagaacgggcaacaacttttccttcagctaccctttcgaggacgtgcctttccacagcagctacgcgcacagccagagtttggacaggctgatgaatcctctcatcgaccagtacctgtactacctgtcaagaacccagtctacgggaggcacagcgggaacccagcagttgctgttttctcaggccgggcctagcaacatgtcggctcaggccagaaactggctgcctggaccctgctacagacagcagcgcgtctccacgacactgtcgcaaaacaacaacagcaactttgcctggactggtgccaccaagtatcatctgaacggcagagactctctggtgaatccgggcgtcgccatggcaaccaacaaggacgacgaggaccgcttcttcccatccagcggcatcctcatgtttggcaagcagggagctggaaaagacaacgtggactatagcaacgtgatgctaaccagcgaggaagaaatcaagaccaccaaccccgtggccacagaacagtatggcgtggtggctgataacctacagcagcaagacaccgctcctattgtgggggccgtcaacagccagggagccttacctggcatggtctggcagaaccgggacgtgtacctgcagggtcctatttgggccaagattcctcacacagatggcaactttcacccgtctcctttaatgggcggctttggacttaaacatccgcctcctcaggtcctcatcaaaaacactcctgttcctgcggatcctccaacagcgttcaaccaggccaagctgaattctttcatcacgcagtacagcaccggacaagtcagcgtggagatcgagtgggagctgcagaaggagaacagcaagcgctggaacccagagattcagtatacttccaactactacaaatctacaaatgtggactttgctgttaatactgagggtgtttactctgagcctcgccccattggcactcgttacctcacccgtaatctgtaa

SEQ ID NO: 484 - DNA, 2214 bp, Adeno-associated virus
atggctgctgacggttatcttccagattggctcgaggacaacctctctgagggcattcgcgagtggtgggacctgaaacctggagcccccaagcccaaggccaaccagcagaagcaggacgacggccggggtctggtgcttcctggctacaagtacctcggacccttcaacggactcgacaagggggagcccgtcaacgcggcggacgcagcggccctcgagcacgacaaggcctacgaccagcagctcaaagcgggtgacaatccgtacctgcggtataaccacgccgacgccgagttccaggagcgtctgcaagaagatacgtcttttgggggcaacctcgggcgagcagtcttccaggccaagaagcgggttctcgaacctctcggtctggctgaggaagctgctaagacggctcctggaaagaagagaccggtagaaccgtcacctcagcgttcccccgactcctccacgggcatcggcaagaaaggccagcagcccgctagaaagagactgaactttgggcagactggcgactcagagtcagtccccgaccctcaaccaatcggagagccaccagcaggcccctctggtctgggatctggtacaatggctgcaggcggtggcgcaccaatggctgacaataacaagggcgccgacggagtgggtaatgcctcaggaaattggcattgcgattccacatggctgggcgacagagtcatcaccaccagcacccgaacctgggctttgcccacctacaacaaccacctctacaagcaaatctccagtcagtcagcaggtagcaccaacgacaacgtctacttcggctacagcaccccctgggggtattttgacttcaacagattccactgtcacttctcaccacgtgactggcagcggctcatcaacaacaactggggattccggcccaagaagctcaacttcaagctgttcaacatccaggtcaaggaggtcacaacgggtgacggcgtcacgaccatcgccaataaccttaccagcacggttcaggtcttttcggactcggaataccagctgccctacgtcctcggctccgcacaccagggctgcctgcctccgttcccggcggacgtcttcatgattccccagtacggctacctgactctgaacaatgacagccaatcggtgggtcgttcctctttctactgcctggaatatttcccttctcaaatgctgagaacgggcaacaacttcaccttcagctacaccttcgaggacgttcccttccacagcagctacgcacacagccagagcctggaccggctgatgaatcctcttatcgaccagtacctgtattacctggccagaacacagagcaacgcaggaggcacagctggcaatcgggaactgcagttttatcagggcgggcctaccaccatggccgaacaagccaaaaactggctgcctggaccttgcttccggcaacaaagagtctccaagacgctggatcaaaacaacaacagcaactttgcttggactggtgccaccaaataccatctaaatggaagaaattcattggttaatcccggtgtcgccatggcaacccacaaggacgacgaggaacgcttcttcccttcgagcggagtcctgatttttggaaaaactggagcagctaataagactacactggaaaatgtgttaatgacaaatgaagaggaaattcgtcctaccaacccggtagccaccgaggaatacgggactgttagcagcaacctgcaggcggctaacactgcagcccagacacaagttgtcaacaaccagggagccttacctggtatggtctggcagaaccgggacgtgtacctgcagggtcccatctgggccaagattcctcacacggacggcaactttcacccgtctccgctgatgggcggctttggactgaagcatccgcctcctcagatcctgatcaaaaacactcctgttcctgctaatcccccggaggtgtttacgcctgccaagtttgcttctttcatcacacagtacagcaccggccaggtcagcgtggagatcgagtgggagctgcagaaggagaacagcaagcgctggaacccagagattcagtatacctccaattttgacaaacagactggtgtggactttgccgttgacagccagggtgtttattctgagcctcgccccattggtactcgttacctcacccgtaatctgtaa

SEQ ID NO: 485 - protein, 737 aa, Adeno-associated virus
MAADGYLPDWLEDNLSEGIREWWDLKPGAPKPKANQQKQDDGRGLVLPGYKYLGPFNGLDKGEPVNAADAAALEHDKAYDQQLKAGDNPYLRYNHADAEFQERLQEDTSFGGNLGRAVFQAKKRVLEPLGLAEEAAKTAPGKKRPVEPSPQRSPDSSTGIGKKGQQPARKRLNFGQTGDSESVPDPQPIGEPPAGPSGLGSGTMAAGGGAPMADNNKGADGVGNASGNWHCDSTWLGDRVITTSTRTWALPTYNNHLYKQISSQSAGSTNDNVYFGYSTPWGYFDFNRFHCHFSPRDWQRLINNNWGFRPKKLNFKLFNIQVKEVTTGDGVTTIANNLTSTVQVFSDSEYQLPYVLGSAHQGCLPPFPADVFMIPQYGYLTLNNDSQSVGRSSFYCLEYFPSQMLRTGNNFTFSYTFEDVPFHSSYAHSQSLDRLMNPLIDQYLYYLARTQSNAGGTAGNRELQFYQGGPTTMAEQAKNWLPGPCFRQQRVSKTLDQNNNSNFAWTGATKYHLNGRNSLVNPGVAMATHKDDEERFFPSSGVLIFGKTGAANKTTLENVLMTNEEEIRPTNPVATEEYGTVSSNLQAANTAAQTQVVNNQGALPGMVWQNRDVYLQGPIWAKIPHTDGNFHPSPLMGGFGLKHPPPQILIKNTPVPANPPEVFTPAKFASFITQYSTGQVSVEIEWELQKENSKRWNPEIQYTSNFDKQTGVDFAVDSQGVYSEPRPIGTRYLTRNL

SEQ ID NO: 486 - DNA, 2217 bp, Adeno-associated virus
atggctgccgatggttatcttccagattggctcgaggacaacctctctgagggcattcgcgagtggtgggacctgaaacctggagccccgaaacccaaagccaaccagcaaaagcaggacgacggccggggtctggtgcttcctggctacaagtacctcggacccttcaacggactcgacaagggggagcccgtcaacgcggcggacgcagcggccctcgagcacgacaaggcctacgaccagcagctcaaagcgggtgacaatccgtacctgcggtataatcacgccgacgccgagtttcaggagcgtctgcaagaagatacgtcttttgggggcaacctcgggcgagcagtcttccaggccaagaagcgggttctcgaacctctcggtctggttgaggaaggcgctaagacggctcctggaaagaagagaccggtagagccgtcaccacagcgttcccccgactcctccacgggcatcggcaagaaaggccagcagcccgccagaaagagactcaatttcggtcagactggcgactcagagtcagtccccgaccctcaacctatcggagaacctccagcagcgccctctagtgtgggatctggtacaatggctgcaggcggtggcgcaccaatggcagacaataacgaaggtgccgacggagtgggtagttcctcgggaaattggcattgcgattccacatggctgggcgacagagtcatcaccaccagcacccgaacctgggccctgcccacctacaacaaccacctctacaagcaaatctccaacgggacctcgggaggcagcaccaacgacaacacctactttggctacagcaccccctgggggtattttgactttaacagattccactgccacttctcaccacgtgactggcagcgactcatcaacaacaactggggattccggcccaagagactcagcttcaagctcttcaacatccaggtcaaagaggtcacgcagaatgaaggcaccaagaccatcgccaataacctcaccagcaccatccaggtgtttacggactcggaataccagctgccgtacgtcctcggctctgcccaccagggctgcctgcctccgttcccggcggacgtcttcatgattcctcagtacggctacctgactctcaacaacggtagtcaggccgtgggacgttcctccttctactgcctggagtacttcccctctcagatgctgagaacgggcaacaacttttccttcagctacactttcgaggacgtgcctttccacagcagctacgcgcacagccagagtttggacaggctgatgaatcctctcatcgaccagtacctgtactacctgtcaagaacccagtctacgggaggcacagcgggaacccagcagttgctgttttctcaggccgggcctagcaacatgtcggctcaggccagaaactggctgcctggaccctgctacagacagcagcgcgtctccacgacactgtcgcaaaacaacaacagcaactttgcctggactggtgccaccaagtatcatctgaacggcagagactctctggtgaatccgggcgtcgccatggcaaccaacaaggacgacgaggaccgcttcttcccatccagcggcatcctcatgtttggcaagcagggagctggaaaagacaacgtggactatagcaacgtgatgctaaccagcgaggaagaaatcaagaccaccaaccccgtggccacagaacagtatggcgtggtggctgataacctacagcagcaaaacaccgctcctattgtgggggccgtcaacagccagggagccttacctggcatggtctggcagaaccgggacgtgtacctgcagggtcctatttgggccaagattcctcacacagatggcaactttcacccgtctcctttaatgggcggctttggacttaaacatccgcctcctcagatcctcatcaaaaacactcctgttcctgcggatcctccaacagcgttcaaccaggccaagctgaattctttcatcacgcagtacagcaccggacaagtcagcgtggagatcgtgtgggagctgcagaaggagaacagcaagcgcaggaacccagagattcagtatacttccaactactacaaatctacaaatgtggactttgctgttaatactgagggtgtttactctgagcctcgccccattggcactcgttacctcacccgtaatctgtaa

SEQ ID NO: 487 - protein, 738 aa, Adeno-associated virus
MAADGYLPDWLEDNLSEGIREWWDLKPGAPKPKANQQKQDDGRGLVLPGYKYLGPFNGLDKGEPVNAADAAALEHDKAYDQQLKAGDNPYLRYNHADAEFQERLQEDTSFGGNLGRAVFQAKKRVLEPLGLVEEGAKTAPGKKRPVEPSPQRSPDSSTGIGKKGQQPARKRLNFGQTGDSESVPDPQPIGEPPAAPSSVGSGTMAAGGGAPMADNNEGADGVGSSSGNWHCDSTWLGDRVITTSTRTWALPTYNNHLYKQISNGTSGGSTNDNTYFGYSTPWGYFDFNRFHCHFSPRDWQRLINNNWGFRPKRLSFKLFNIQVKEVTQNEGTKTIANNLTSTIQVFTDSEYQLPYVLGSAHQGCLPPFPADVFMIPQYGYLTLNNGSQAVGRSSFYCLEYFPSQMLRTGNNFSFSYTFEDVPFHSSYAHSQSLDRLMNPLIDQYLYYLSRTQSTGGTAGTQQLLFSQAGPSNMSAQARNWLPGPCYRQQRVSTTLSQNNNSNFAWTGATKYHLNGRDSLVNPGVAMATNKDDEDRFFPSSGILMFGKQGAGKDNVDYSNVMLTSEEEIKTTNPVATEQYGVVADNLQQQNTAPIVGAVNSQGALPGMVWQNRDVYLQGPIWAKIPHTDGNFHPSPLMGGFGLKHPPPQILIKNTPVPADPPTAFNQAKLNSFITQYSTGQVSVEIVWELQKENSKRRNPEIQYTSNYYKSTNVDFAVNTEGVYSEPRPIGTRYLTRNL

SEQ ID NO: 488 - protein, 738 aa, Adeno-associated virus
MAADGYLPDWLEDNLSEGIREWWDLKPGAPKPKANQQKQDDGRGLVLPGYKYLGPFNGLDKGEPVNAADAAALEHDKAYDQQLKAGDNPYLRYNHADAEFQERLQEDTSFGGNLGRAVFQAKKRVLEPLGLVEEGAKTAPGKKRPVEPSPQRSPDSSTGIGKKGQQPARKRLNFGQTGDSESVPDPQPIGEPPAAPSSVGSGTMAAGGGAPMADNNEGADGVGSSSGNWHCDSTWLGDRVITTSTRTWALPTYNNHLYKQISNGTSGGSTNDNTYFGYSTPWGYFDFNRFHCHFSPRDWQRLINNNWGFRPKRLSFKLFNIQVKEVTQNEGTKTIANNLTSTIQVFTDSEYQLPYVLGSAHQGCLPPFPADVFMIPQYGYLTLNNGSQAVGRSSFYCLEYFPSQMLRTGNNFSFSYTFEDVPFHSSYAHSQSLDRLMNPLIDQYLYYLSRTQSTGGTAGTQQLLFSQAGPSNMSAQARNWLPGPCYRQQRVSTTLSQNNNSNFAWTGATKYHLNGRDSLVNPGVAMATNKDDEDRFFPSSGILMFGKQGAGKDNVDYSNVMLTSEEEIKTTNPVATEQYGVVADNLQQQNTAPIVGAVNSQGALPGMVWQNRDVYLQGPIWAKIPHTDGNFHPSPLMGGFGLKHPPPQILIKNTPVPADPPTAFNQAKLNSFITQYSTGQVSVEIEWELQKENSKRWNPEIQYTSNYYKSTNVDFAVNTEGVYSEPRPIGTRYLTRNL

SEQ ID NO: 489 - protein, 738 aa, Adeno-associated virus
MAADGYLPDWLEDNLSEGIREWWDLKPGAPKPKANQQKQDDGRGLVLPGYKYLGPFNGLDKGEPVNAADAAALEHDKAYDQQLKAGDNPYLRYNHADAEFQERLQEDTSFGGNLGRAVFQAKKRVLEPLGLVEEGAKTAPGKKRPVEPSPQRSPDSSTGIGKKGQQPARKRLNFGQTGDSESVPDPQPIGEPPAAPSSVGSGTMAAGGGAPMADNNEGADGVGSSSGNWHCDSTWLGDRVITTSTRTWALPTYNNHLYKQISNGTSGGSTNDNTYFGYSTPWGYFDFNRFHCHFSPRDWQRLINNNWGFRPKRLSFKLFNIQVKEVTQNEGTKTIANNLTSTIQVFTDSEYQLPYVLGSAHQGCLPPFPADVFMIPQYGYLTLNNGSQAVGRSSFYCLEYFPSQMLRTGNNFSFSYTFEDVPFHSSYAHSQSLDRLMNPLIDQYLYYLSRTQSTGGTAGTQQLLFSQAGPSNMSAQARNWLPGPCYRQQRVSTTLSQNNNSNFAWTGATKYHLNGRDSLVNPGVAMATNKDDEDRFFPSSGILMFGKQGAGKDNVDYSNVMLTSEEEIKTTNPVATEQYGVVADNLQQQNTAPIVGAVNSQGALPGMVWQNRDVYLQGPIWAKIPHTDGNFHPSPLMGGFGLKHPPPQILIKNTPVPADPPTAFNQAKLNSFITQYSTGQVSVEIVWELQKENSKRWNPEIQYTSNYYKSTNVDFAVNTEGVYSEPRPIGTRYLTRNL

SEQ ID NO: 490 - protein, 738 aa, Adeno-associated virus; identical to SEQ ID NO: 488

SEQ ID NO: 491 - DNA, 2214 bp, Adeno-associated virus
atggctgctgacggttatcttccagattggctcgaggacaacctctctgagggcattcgcgagtggtgggacctgaaacctggagcccccaagcccaaggccaaccagcagaagcaggacgacggccggggtctggtgcttcctggctacaagtacctcggacccttcaacggactcgacaagggggagcccgtcaacgcggcggacgcagcggccctcgagcacgacaaggcctacgaccagcagctcaaagcgggtgacaatccgtacctgcggtataaccacgccgacgccgagtttcaggagcgtctgcaagaagatacgtcttttgggggcaacctcgggcgagcagtcttccaggccaagaagcgggttctcgaacctctcggtctggttgaggaagctgctaagacggctcctggaaagaagagaccggtagaaccgtcacctcagcgttcccccgactcctccacgggcatcggcaagaaaggccagcagcccgctagaaagagactgaactttgggcagactggcgactcagagtcagtccccgaccctcaaccaatcggagaaccaccagcaggcccctctggtctgggatctggtacaatggctgcaggcggtggcgctccaatggcagacaataacgaaggcgccgacggagtgggtaatgcctcaggaaattggcattgcgattccacatggctgggcgacagagtcatcaccaccagcacccgaacctgggctttgcccacctacaacaaccacctctacaagcaaatctccagtcagtcagcaggtagcaccaacgacaacgtctacttcggctacagcaccccctgggggtattttgacttcaacagattccactgtcacttctcaccacgtgactggcagcggctcatcaacaacaactggggattccggcccaagaagctcaacttcaagctgttcaacatccaggtcaaggaggtcacaacgaatgacggcgtcacgaccatcgccaataaccttaccagcacggttcaggtcttttcggactcggaataccagctgccctacgtcctcggctccgcacaccagggctgcctgcctccgttcccggcggacgtcttcatgattccccagtacggctacctgactctgaacaatggcagccaatcggtgggtcgttcctctttctactgcctggaatatttcccttctcaaatgctgagaacgggcaacaacttcaccttcagctacaccttcgaggacgttcccttccacagcagctacgcacacagccagagcctggaccggctgatgaatcctcttatcgaccagtacctgtattacctggccagaacacagagcaacgcaggaggcacagctggcaatcgggaactgcagttttatcagggcgggcctaccaccatggccgaacaagccaaaaactggctgcctagaccttgcttccggcaacaaagagtctccaagacgctggatcaaaacaacaacagcaactttgcttggactggtgccaccaaataccatctaaatggaagaaattcattggttaatcccggtgtcgccatggcaacccacaaggacgacgaggaacgcttcttcccttcgagcggagtcctgatttttggaaaaactggagcagctaataagactacactggaaaatgtgttaatgacaaatgaagaggaaattcgtcctaccaacccggtagccaccgaggaatacgggactgttagcagcaacctgcaggcggctaacactgcagcccagacacaagttgtcaacaaccagggagccttacctggtatggtctggcagaaccgggacgtgtacctgcagggtcccatctgggccaagattcctcacacggacggcaactttcacccgtctccgctgatgggcggctttggactgaagcatccgcctcctcagatcctgatcaaaaacactcctgttcctgctaatcccccggaggtgtttacgcctgccaagtttgcttctttcatcacacagtacagcaccggccaggtcagcgtggagatcgagtgggagctgcagaaggagaacagcaagcgctggaacccagagattcagtatacctccaattttgacaaacagactggtgtggactttgccgttgacagccagggtgtttattctgagcctcgccccattggtactcgttacctcacccgtaatctgtaa

SEQ ID NO: 492 - protein, 737 aa, Adeno-associated virus
MAADGYLPDWLEDNLSEGIREWWDLKPGAPKPKANQQKQDDGRGLVLPGYKYLGPFNGLDKGEPVNAADAAALEHDKAYDQQLKAGDNPYLRYNHADAEFQERLQEDTSFGGNLGRAVFQAKKRVLEPLGLVEEAAKTAPGKKRPVEPSPQRSPDSSTGIGKKGQQPARKRLNFGQTGDSESVPDPQPIGEPPAGPSGLGSGTMAAGGGAPMADNNEGADGVGNASGNWHCDSTWLGDRVITTSTRTWALPTYNNHLYKQISSQSAGSTNDNVYFGYSTPWGYFDFNRFHCHFSPRDWQRLINNNWGFRPKKLNFKLFNIQVKEVTTNDGVTTIANNLTSTVQVFSDSEYQLPYVLGSAHQGCLPPFPADVFMIPQYGYLTLNNGSQSVGRSSFYCLEYFPSQMLRTGNNFTFSYTFEDVPFHSSYAHSQSLDRLMNPLIDQYLYYLARTQSNAGGTAGNRELQFYQGGPTTMAEQAKNWLPRPCFRQQRVSKTLDQNNNSNFAWTGATKYHLNGRNSLVNPGVAMATHKDDEERFFPSSGVLIFGKTGAANKTTLENVLMTNEEEIRPTNPVATEEYGTVSSNLQAANTAAQTQVVNNQGALPGMVWQNRDVYLQGPIWAKIPHTDGNFHPSPLMGGFGLKHPPPQILIKNTPVPANPPEVFTPAKFASFITQYSTGQVSVEIEWELQKENSKRWNPEIQYTSNFDKQTGVDFAVDSQGVYSEPRPIGTRYLTRNL

SEQ ID NO: 493 - DNA, 2214 bp, Adeno-associated virus
atggctgctgacggttatcttccagattggctcgaggacaacctctctgagggcattcgcgagtggtgggacctgaaacctggagcccccaagcccaaggccaaccagcagaagcaggacgacggccggggtctggtgcttcctggctacaagtacctcggacccttcaacggactcgacaagggggagcccgtcaacgcggcggacgcagcggccctcgagcacgacaaggcctacgaccagcagctcaaagcgggtgacaatccgtacctgcggtataaccatgccgacgccgagtttcaggagcgtctgcaagaagatacgtcttttgggggcaacctcgggcgagcagtcctccaggccaagaagcgggttctcgaacctctcggtctggttgaggaagctgctaagacggctcctggaaagaagagaccggtagaaccgtcacctcagcgttcccccgactcctccacgggcatcggcaagaaaggccagcagcccgctagaaagagactgaactttgggcagactggcgactcagagtcagtccccgaccctcaaccaatcggagaaccaccagcaggcccctctggtctgggatctggtacaatggctgcaggcggtggcgctccaatggcagacaataacgaaggcgccgacggagtgggtaatgcctcaggaaattggcattgcgattccacatggctgggcgacagagtcatcaccaccagcacccgaacctgggctttgcccacctacaacaaccacctctacaagcaaatctccagtcagtcagcaggtagcaccaacgacaacgtctacttcggctacagcaccccctgggggtattttgacttcaacagattccactgtcacttctcaccacgtgactggcagcggctcatcaacaacaactggggattccggcccaagaagctcaacttcaagctgttcaacatccaggtcaaggaggtcacaacgaatgacggcgtcacgaccatcgccaataaccttaccagcacggttcaggtcttttcggactcggaataccagctgccctacgtcctcggctccgcacaccagggctgcctgcctccgttcccggcggacgtcttcatgattccccagtacggctacctgactctgaacaatggcagccaatcggtgggtcgttcctctttctactgcctggaatatttcccttctcaaatgctgagaacgggcaacaacttcaccttcagctacaccttcgaggacgttcccttccacagcagctacgcacacagccagagcctggaccggctgatgaatcctcttatcgaccagtacctgtattacctggccagaacacagagcaacgcaggaggcacagctggcaatcgggaactgcagttttatcagggcgggcctaccaccatggccgaacaagccaaaaactggctgcctggaccttgcttccggcaacaaagagtctccaagacgctggatcaaaacaacaacagcaactttgcttggactggtgccaccaaataccatctaaatggaagaaattcattggttaatcccggtgtcgccatggcaacccacaaggacgacgaggaacgcttcttcccttcgagcggagtcctgatttttggaaaaactggagcagctaataagactacactggaaaatgtgttaatgacaaatgaagaggaaattcgtcctaccaacccggtagccaccgaggaatacgggactgttagcagcaacctgcaggcggctaacactgcagcccagacacaagttgtcaacaaccagggagccttacctggtatggtctggcagaaccgggacgtgtacctgcagggtcccatctgggccaagattcctcacacggacggcaactttcacccgtctccgctgatgggcggctttggactgaagcatccgcctcctcagatcctgatcaaaaacactcctgttcctgctaatcccccggaggtgtttacgcctgccaagtttgcttctttcatcacacagtacagcaccggccaggtcagcgtggagatcgagtgggagctgcagaaggagaacagcaagcgctggaacccagagattcagtatacctccaattttgacaaacagactggtgtggactttgccgttgacagccagggtgtttattctgagcctcgccccattggtactcgttacctcacccgtaatctgtaa

SEQ ID NO: 494 - protein, 737 aa, Adeno-associated virus; identical to SEQ ID NO: 453

SEQ ID NO: 495 - protein, 737 aa, Adeno-associated virus
MAADGYLPDWLEDNLSEGIREWWDLKPGAPKPKANQQKQDDGRGLVLPGYKYLGPFNGLDKGEPVNAADAAALEHDKAYDQQLKAGDNPYLRYNHADAEFQERLQEDTSFGGNLGRAVLQAKKRVLEPLGLVEEAAKTAPGKKRPVEPSPQRSPDSSTGIGKKGQQPARKRLNFGQTGDSESVPDPQPIGEPPAGPSGLGSGTMAAGGGAPMADNNEGADGVGNASGNWHCDSTWLGDRVITTSTRTWALPTYNNHLYKQISSQSAGSTNDNVYFGYSTPWGYFDFNRFHCHFSPRDWQRLINNNWGFRPKKLNFKLFNIQVKEVTTNDGVTTIANNLTSTVQVFSDSEYQLPYVLGSAHQGCLPPFPADVFMIPQYGYLTLNNGSQSVGRSSFYCLEYFPSQMLRTGNNFTFSYTFEDVPFHSSYAHSQSLDRLMNPLIDQYLYYLARTQSNAGGTAGNRELQFYQGGPTTMAEQAKNWLPGPCFRQQRVSKTLDQNNNSNFAWTGATKYHLNGRNSLVNPGVAMATHKDDEERFFPSSGVLIFGKTGAANKTTLENVLMTNEEEIRPTNPVATEEYGTVSSNLQAANTAAQTQVVNNQGALPGMVWQNRDVYLQGPIWAKIPHTDGNFHPSPLMGGFGLKHPPPQILIKNTPVPANPPEVFTPAKFASFITQYSTGQVSVEIEWELQKENSKRWNPEIQYTSNFDKQTGVDFAVDSQGVYSEPRPIGTRYLTRNL

SEQ ID NO: 496 - DNA, 2217 bp, Adeno-associated virus
atggctgccgatggttatcttccagattggctcgaggacaacctctctgagggcattcgcgagtggtgggacctgaaacctggagccccgaaacccaaagccaaccagcaaaagcaggacgacggccggggtctggtgcttcctggctacaagtacctcggacccttcaacggactcgacaagggggagcccgtcaacgcggcggacgcagcggccctcgagcacgacaaggcctacgaccagcagctcaaagcgggtgacaatccgtacctgcggtataatcacgccgacgccgagtttcaggagcgtctgcaagaagatacgtcttttgggggcaacctcgggcgagcagtcttccaggccaagaagcgggttctcgaacctctcggtctggttgaggaaggcgctaagacggctcctggaaagaagagaccggtagagccgtcaccacagcgttcccccgactcctccacgggcatcggcaagaaaggccagcagcccgccagaaagagactcaatttcggtcagactggcgactcagagtcagtccccgaccctcaacctatcggagaacctccagcagcgccctctagtgtgggatctggtacaatggctgcaggcggtggcgcaccaatggcagacaataacgaaggtgccgacggagtgggtagttcctcgggaaattggcattgcgattccacatggctgggcgacagagtcatcaccaccagcacccgaacctgggccctgcccacctacaacaaccacctctacaagcaaatctccaacgggacctcgggaggcagcaccaacgacaacacctactttggctacagcaccccctgggggtattttgactttaacagattccactgccacttctcaccacgtgactggcagcgactcatcaacaacaactggggattccggcccaagagactcagcttcaagctcttcaacatccaggtcaaagaggtcacgcagaatgaaggcaccaagaccatcgccaataacctcaccagcaccatccaggtgtttacggactcggaataccagctgccgtacgtcctcggctctgcccaccagggctgcctgcctccgttcccggcggacgtcttcatgattcctcagtacggctacctgactctcaacaacggtagtcaggccgtgggacgttcctccttctactgcctggagtacttcccctctcagatgctgagaacgggcaacaacttttccttcagctacactttcgaggacgtgcctttccacagcagctacgcgcacagccagagtttggacaggctgatgaatcctctcatcgaccagtacctgtactacctgtcaagaacccagtctacgggaggcacagcgggaacccagcagttgctgttttctcaggccgggcctagcaacatgtcggctcaggccagaaactggctgcctggaccctgctacagacagcagcgcgtctccacgacactgtcgcaaaacaacaacagcaactttgcctggactggtgccaccaagtatcatctgaacggcagagactctctggtgaatccgggcgtcgccatggcaaccaacaaggacgacgaggaccgcttcttcccacccagcggcatcctcatgtttggcaagcagggagctggaaaagacaacgtggactatagcaacgtgatgctaaccagcgaggaagaaatcaagaccaccaaccccgtggccacagaacagtatggcgtggtggctgataacctacagcagcaaaacaccgctcctattgtgggggccgtcaacagccagggagccttacctggcatggtctggcagaaccgggacgtgtacctgcagggtcctatttgggccaagattcctcacacagatggcaactttcacccgtctcctttaatgggcggctttggacttaaacatccgcctcctcagatcctcatcaaaaacactcctgttcctgcggatcctccaacagcgttcaaccaggccaagctgaattctttcatcacgcagtacagcaccggacaagtcagcgtggtgatcgagtgggagctgcagaaggagaacagcaagcgctggaacccagagattcagtatacttccaactactacaaatctacaaatgtggactttgctgttaatactgagggtgtttactctgagcttcgccccattggcactcgttacctcacccgtaatctgtaa

SEQ ID NO: 497 - protein, 738 aa, Adeno-associated virus
MAADGYLPDWLEDNLSEGIREWWDLKPGAPKPKANQQKQDDGRGLVLPGYKYLGPFNGLDKGEPVNAADAAALEHDKAYDQQLKAGDNPYLRYNHADAEFQERLQEDTSFGGNLGRAVFQAKKRVLEPLGLVEEGAKTAPGKKRPVEPSPQRSPDSSTGIGKKGQQPARKRLNFGQTGDSESVPDPQPIGEPPAAPSSVGSGTMAAGGGAPMADNNEGADGVGSSSGNWHCDSTWLGDRVITTSTRTWALPTYNNHLYKQISNGTSGGSTNDNTYFGYSTPWGYFDFNRFHCHFSPRDWQRLINNNWGFRPKRLSFKLFNIQVKEVTQNEGTKTIANNLTSTIQVFTDSEYQLPYVLGSAHQGCLPPFPADVFMIPQYGYLTLNNGSQAVGRSSFYCLEYFPSQMLRTGNNFSFSYTFEDVPFHSSYAHSQSLDRLMNPLIDQYLYYLSRTQSTGGTAGTQQLLFSQAGPSNMSAQARNWLPGPCYRQQRVSTTLSQNNNSNFAWTGATKYHLNGRDSLVNPGVAMATNKDDEDRFFPPSGILMFGKQGAGKDNVDYSNVMLTSEEEIKTTNPVATEQYGVVADNLQQQNTAPIVGAVNSQGALPGMVWQNRDVYLQGPIWAKIPHTDGNFHPSPLMGGFGLKHPPPQILIKNTPVPADPPTAFNQAKLNSFITQYSTGQVSVVIEWELQKENSKRWNPEIQYTSNYYKSTNVDFAVNTEGVYSELRPIGTRYLTRNL

SEQ ID NO: 498 - DNA, 2214 bp, Adeno-associated virus
atggctgctgacggttatcttccagattggctcgaggacaacctctctgagggcattcgcgagtggtgggacctgaaacctggagcccccaagcccaaggccaaccagcagaagcaggacgacggccggggtctggtgcttcctggctacaagtacctcggacccttcaacggactcgacaagggggagcccgtcaacgcggcggacgcagcggccctcgagcacgacaaggcctacgaccagcagctcaaagcgggtgacaatccgtacctgcggtataaccacgccgacgccgagtttcaggagcgtctgcaagaagatacgtcttttgggggcaacctcgggcgagcagtcttccaggccaagaagcgggttctcgaacctctcggtctggttgaggaagctgctaagacggctcctggaaagaagagaccggtagaaccgtcacctcagcgttcccccgactcctccacgggcatcggcaagaaaggccagcagcccgctagaaagagactgaactttgggcagactggcgactcagagtcagtccccgaccctcaaccaatcggagaaccaccagcaggcccctctggtctgggatctggtacaatggctgcaggcggtggcgccccaatggcagacaataacgaaggcgccgacggagtgggtaatgcctcaggaaattggcattgcgattccacatggctgggcgacagagtcatcaccaccagcacccgaacctgggctttgcccacctacaacaaccacctctacaagcaaatctccagtcagtcagcaggtagcaccaacgacaacgtctacttcggctacagcaccccctgggggtattttgacttcaacagattccactgtcacttctcaccacgtgactggcagcggctcatcaacaacaactggggattccggcccaagaagctcaacttcaagctgttcaacatccaggtcaaggaggtcacaacgaatgacggcgtcacgaccatcgccaataaccttaccagcacggttcaggtcttttcggactcggaataccagctgccctacgtcctcggctccgcacaccagggctgcctgcctccgttcccggcggacgtcttcatgattccccagtacggctacctgactctgaacaatggcagccaatcggtgggtcgttcctctttctactgcctggaatatttcccttctcaaatgctgagaacgggcaacaacttcaccatcagctacaccttcgaggacgttcccttccacagcagctacgcacacagccagagcctggaccggctgatgaatcctcttatcgaccagtacctgtattacctggccagaacacagagcaacgcaggaggcacagctggcaatcaggaactgcagttttatcagggcgggcctaccaccatggccgaacaagccaaaaactggctgcctggaccttgcttccggcaacaaagagtctccaagacgctggatcaaaacaacaacagcaactttgcttggactggtgccaccaaataccatctaaatggaagaaattcattggttaatcccggtgtcgccatggcaacccacaaggacgacgaggaacgcttcttcccttcgagcggagtcctgatttttggaaaaactggagcagctaataagactacactggaaaatgtgttaatgacaaatgaagaggaaattcgtcctaccaacccggtagccaccgaggaatacgggactgttagcagcaacctgcaggcggctaacactgcagcccagacacaagttgtcaacaaccagggagccttacctggtatggtctggcagaaccgggacgtgtacctgcagggtcccatctgggccaagattcctcacacagatggcaactttcacccgtctcctttaatgggcggctttggacttaaacatccgcctcctcagatcctcatcaaaaacactcctgttcctgcggatcctccaacagcgttcaaccaggccaagctgaattctttcatcacgcagtacagcaccggacaagtcagcgtggagatcgagtgggagctgcagaaggagaacagcaagcgctggaacccagagattcagtatacttccaactactacaaatctacaaatgtggactttgctgttaatactgagggtgtttactctgagcctcgccccattggcactcgttacctcacccgtaatctgtaa

SEQ ID NO: 499 - protein, 737 aa, Adeno-associated virus
MAADGYLPDWLEDNLSEGIREWWDLKPGAPKPKANQQKQDDGRGLVLPGYKYLGPFNGLDKGEPVNAADAAALEHDKAYDQQLKAGDNPYLRYNHADAEFQERLQEDTSFGGNLGRAVFQAKKRVLEPLGLVEEAAKTAPGKKRPVEPSPQRSPDSSTGIGKKGQQPARKRLNFGQTGDSESVPDPQPIGEPPAGPSGLGSGTMAAGGGAPMADNNEGADGVGNASGNWHCDSTWLGDRVITTSTRTWALPTYNNHLYKQISSQSAGSTNDNVYFGYSTPWGYFDFNRFHCHFSPRDWQRLINNNWGFRPKKLNFKLFNIQVKEVTTNDGVTTIANNLTSTVQVFSDSEYQLPYVLGSAHQGCLPPFPADVFMIPQYGYLTLNNGSQSVGRSSFYCLEYFPSQMLRTGNNFTISYTFEDVPFHSSYAHSQSLDRLMNPLIDQYLYYLARTQSNAGGTAGNQELQFYQGGPTTMAEQAKNWLPGPCFRQQRVSKTLDQNNNSNFAWTGATKYHLNGRNSLVNPGVAMATHKDDEERFFPSSGVLIFGKTGAANKTTLENVLMTNEEEIRPTNPVATEEYGTVSSNLQAANTAAQTQVVNNQGALPGMVWQNRDVYLQGPIWAKIPHTDGNFHPSPLMGGFGLKHPPPQILIKNTPVPADPPTAFNQAKLNSFITQYSTGQVSVEIEWELQKENSKRWNPEIQYTSNYYKSTNVDFAVNTEGVYSEPRPIGTRYLTRNL

SEQ ID NO: 500 - DNA, 2217 bp, Adeno-associated virus
atggctgccgatggttatcttccagattggctcgaggacaacctctctgagggcattcgcgagtggtgggacctgaaacctggagccccgaaacccaaagccaaccagcaaaagcaggacgacggccggggtctggtgcttcctggctacaagtacctcggacccttcaacggactcgacaagggggagcccgtcaacgcggcggacgcagcggccctcgagcacgacaaggcctacgaccagcagctcaaagcgggtgacaatccgtacctgcggtataatcacgccgacgccgagtttcaggagcgtctgcaagaagatacgtcttttgggggcaacctcgggcgagcagtcttccaggccaagaagcgggttctcgaacctctcggtctggttgaggaaggcgctaagacggctcctggaaagaagagaccggtagagccgtcaccacagcgttcccccgactcctccacgggcatcggcaagaaaggccagcagcccgccagaaagagactcaatttcggtcagactggcgactcagagtcagtccccgaccctcaacctatcggagaacctccagcagcgccctctagtgtgggatctggtacaatggctgcaggcggtggcgcaccaatggcagacaataacgaaggtgccgacggagtgggtagttcctcgggaaattggcattgcgattccacatggctgggcgacagagtcatcaccaccagcacccgaacctgggccctgcccgcctacaacaaccacctctacaagcaaatctccaacgggacctcgggaggcagcaccaacgacaacacctactttggctacagcaccccctgggggtattttgactttaacagattccactgccacttctcaccacgtgactggcagcgactcatcaacaacaactggggattccggcccaagagactcagcttcaagctcttcaacatccaggtcaaagaggtcacgcagaatgaaggcaccaagaccatcgccaataacctcaccagcaccatccaggtgtttacggactcggaataccagctgccgtacgtcctcggctctgcccaccagggctgcctgcctccgttcccggcggatgtcttcatgattcctcagtacggctacctgactctcaacaacggtagtcaggccgtgggacgttcctccttctactgcctggagtacttcccctctcagatgctgagaacgggcaacaacttttccttcagctacactttcgaggacgtgcctttccacagcagctacgcgcacagccagagtttggacaggctgatgaatcctctcatcgaccagtacctgtactacctgtcaagaacccagtctacgggaggcacagcgggaacccagcagttgctgttttctcaggccgggcctagcaacatgtcggctcaggccagaaactggctgcctggaccctgctacagacagcagcgcgtctccacgacactgtcgcaaaacaacaacagcaactttgcctggactggtgccaccaagtatcatctgagcggcagagactctctggtgaatccgggcgtcgccatggcaaccaacaaggacgacgaggaccgcttcttcccatccagcggcatcctcatgtttggcaagcagggagctggaaaagacaacgtggactatagcaacgtgatgctaaccagcgaggaagaaatcaagaccaccaaccccgtggccacagaacagtatggcgtggtggctgataacctacagcagcaaaacaccgctcctattgtgggggccgtcaacagccagggagccttacctggcatggtctggcagaaccgggacgtgtacctgcagggtcctatttgggccaagattcctcacacagatggcaactttcacccgtctcctttaatgggcggctttggacttaaacatccgcctcctcagatcctcatcaaaaacactcctgttcctgcggatcctccaacagcgttcaaccaggccaagctgaattcttccatcacgcagtacagcaccggacaagtcagcgtggagatcgagtgggagctgcagaaggagaacagcaagcgctggaacccagagattcagtatacttccaactactacaaatctacaaatgtggactttgctgttaatactgagggtgtttactctgagcctcgccccattggcactcgttacctcacccgtaatttgtaa

SEQ ID NO: 501 - protein, 738 aa, Adeno-associated virus
MAADGYLPDWLEDNLSEGIREWWDLKPGAPKPKANQQKQDDGRGLVLPGYKYLGPFNGLDKGEPVNAADAAALEHDKAYDQQLKAGDNPYLRYNHADAEFQERLQEDTSFGGNLGRAVFQAKKRVLEPLGLVEEGAKTAPGKKRPVEPSPQRSPDSSTGIGKKGQQPARKRLNFGQTGDSESVPDPQPIGEPPAAPSSVGSGTMAAGGGAPMADNNEGADGVGSSSGNWHCDSTWLGDRVITTSTRTWALPAYNNHLYKQISNGTSGGSTNDNTYFGYSTPWGYFDFNRFHCHFSPRDWQRLINNNWGFRPKRLSFKLFNIQVKEVTQNEGTKTIANNLTSTIQVFTDSEYQLPYVLGSAHQGCLPPFPADVFMIPQYGYLTLNNGSQAVGRSSFYCLEYFPSQMLRTGNNFSFSYTFEDVPFHSSYAHSQSLDRLMNPLIDQYLYYLSRTQSTGGTAGTQQLLFSQAGPSNMSAQARNWLPGPCYRQQRVSTTLSQNNNSNFAWTGATKYHLSGRDSLVNPGVAMATNKDDEDRFFPSSGILMFGKQGAGKDNVDYSNVMLTSEEEIKTTNPVATEQYGVVADNLQQQNTAPIVGAVNSQGALPGMVWQNRDVYLQGPIWAKIPHTDGNFHPSPLMGGFGLKHPPPQILIKNTPVPADPPTAFNQAKLNSSITQYSTGQVSVEIEWELQKENSKRWNPEIQYTSNYYKSTNVDFAVNTEGVYSEPRPIGTRYLTRNL

SEQ ID NO: 502 - protein, 736 aa, Adeno-associated virus; identical to SEQ ID NO: 2

SEQ ID NO: 503 - DNA, 2217 bp, Adeno-associated virus
atggctgctgacggttatcttccagattggctcgaggacaacctctctgagggcattcgcgagtggtgggacctgaaacctggagcccccaagcccaaggccaaccagcagaagcaggacgacggccggggtctggtgcttcctggctacaagtacctcggacccttcaacggactcgacaagggggagcccgtcaacgcggcggacgcagcggccctcgagcacgacaaggcctacgaccagcagctcaaagcgggtgacaatccgtacctgcggtataaccacgccgacgccgagtttcaggagcgtctgcaagaagatacgtcttttgggggcaacctcgggcgagcagtcttccaggccaagaagcgggttctcgaacctctcggtctggttgaggaagctgctaagacggctcctggaaagaagagaccggtagaaccgtcacctcagcgttcccccgactcctccacgggcatcggcaagaaaggccagcagcccgctaaaaagagactgaactttggtcagactggcgactcagagtcagtccccgaccctcaaccaatcggagaaccaccagcaggcccctctggtctgggatctggtacaatggctgcaggcggtggcgctccaatggcagacaataacgaaggcgccgacggagtgggtagttcctcaggaaattggcattgcgattccacatggctgggcgacagagtcatcaccaccagcacccgaacctgggccctgcccacctacaacaaccacctctacaagcaaatatccaatgggacatcgggaggaagcaccaacgacaacacctacttcggctacagcaccccctgggggtattttgacttcaacagattccactgccacttctcaccacgtgactggcagcgactcatcaacaacaactggggattccggccaaaaagactcagcttcaagctcttcaacatccaggtcaaggaggtcacgcagaatgaaggcaccaagaccatcgccaataaccttaccagcacgattcaggtatttacggactcggaataccagctgccgtacgtcctcggctccgcgcaccagggctgcctgcctccgttcccggcggacgtcttcatgattccccagtacggctaccttacactgaacaatggaagtcaagccgtaggccgttcctccttctactgcctggaatattttccatctcaaatgctgcgaactggaaacaattttgaattcagctacaccttcgaggacgtgcctttccacagcagctacgcacacagccagagcttggaccgactgatgaatcctctcatcgaccagtacctgtactacttatccagaactcagtccacaggaggaactcaaggtacccagcaattgttattttctcaagctgggcctgcaaacatgtcggctcaggctaagaactggctacctggaccttgctaccggcagcagcgagtctctacgacactgtcgcaaaacaacaacagcaactttgcttggactggtgccaccaaatatcacctgaacggaagagactctttggtaaatcccggtgtcgccatggcaacccacaaggacgacgaggaacgcttcttcccgtcgagtggagtcctgatgtttggaaaacagggtgctggaagagacaatgtggactacagcagcgttatgctaaccagcgaagaagaaattaaaaccactaaccctgtagccacagaacaatacggtgtggtggctgacaacttgcagcaaaccaatacagggcctattgtgggaaatgtcaacagccaaggagccttacctggcatggtctggcagaaccgagacgtgtacctgcagggtcccatctgggccaagattcctcacacggacggcaacttccacccttcaccgctaatgggaggatttggactgaagcacccacctcctcagatcctgatcaagaacacgccggtacctgcggatcctccaacaacgttcagccaggcgaaattggcttccttcattacgcagtacagcaccggacaggtcagcgtggaaatcgagtgggagctgcagaaggagaacagcaaacgctggaacccagagattcagtacacttcaaactactacaaatctacaaatgtggactttgctgtcaatacagagggaacttattctgagcctcgccccattggtactcgttacctcacccgtaatctgtaa

SEQ ID NO: 504 - protein, 738 aa, Adeno-associated virus
MAADGYLPDWLEDNLSEGIREWWDLKPGAPKPKANQQKQDDGRGLVLPGYKYLGPFNGLDKGEPVNAADAAALEHDKAYDQQLKAGDNPYLRYNHADAEFQERLQEDTSFGGNLGRAVFQAKKRVLEPLGLVEEGAKTAPGKKRPVEPSPQRSPDSSTGIGKKGQQPARKRLNFGQTGDSESVPDPQPLGEPPAAPSSVGSGTMAAGGGAPMADNNEGADGVGSSSGNWHCDSTWLGDRVITTSTRTWALPTYNNHLYKQISNGTSGGSTNDNTYFGYSTPWGYFDFNRFHCHFSPRDWQRLINNNWGFRPKRLSFKLFNIQVKEVTQNEGTKTIANNLTSTIQVFTDSEYQLPYVLGSAHQGCLPPFPADVFMIPQYGYLTLNNGSQAVGRSSFYCLEYFPSQMLRTGNNFSFSYTFEDVPFHSSYAHSQSLDRLMNPLIDQYLYYLSRTQSTGGTAGTQQLLFSQAGPSNMSAQARNWLPGPCYRQQRVSTTLSQNNNSNFAWTGATKYHLNGRDSLVNPGVAMATNKDDEDRFFPSSGILMFGKQGAGKDNVDYSNVMLTSEEEIKTTNPVATEQYGVVADNLQRQNTAPIVGAVNSQGALPGMVWQNRDVYLQGPIWAKIPHTDGNFHPSPLMGGFGLKHPPPQILIKNTPVPADPPTAFNQAKLNSFITQYSTGQVSVEIEWELQKENSKRWNPEIQYTSNYYKSTNVDFAVNTEGVYSEPRPIGTRYLTRNL

SEQ ID NO: 505 - protein, 736 aa, Adeno-associated virus
MAADGYLPDWLEDNLSEGIREWLNLKPGAPQPKANQQKQDNARGLVLPGYKYLGPFNGLDKGDPVNEADAAALEHDKAYGQQLKAGDNPYLKYNHADAEFQERLQKDTSFGGNLGKAVFQAKKRILEPLGLVETPAKTAPGKKRPVDPSPQRSPDSSSGIGKKSPHPARKRLNFGQTGEAESVPDPQPIGEPPSDPSSVGSGTMAAGGGAPMADNNEGADGVGNSSGNWHCDSTWLGDRVITTSTRTWALPTYNNHLYKQISSQSGATNDNHYFGYSTPWGYFDFNRFHCHFSPRDWQRLINNNWGFRPKRLSFKLFNIQVKEVTQNDGTTTIANNLTSTVQVFTDSEYQLPYVLGSAHQGCLPPFPADVFMIPQYGYLTLNNGSQAVGRSSFYCLEYFPSQMLRTGNNFQFSYTFEDVPFHSSYAHSQSLDRLMNPLIDQYLYYLSKTQGTNATVQGAKLQFSQAGPSNMRDQARNWLPGPCYRQQRVSKTANDNNNSEYAWTGATKYHLNGRDSLVNPGPAMASHKDDEEKFFPMNGTLVFGKNGAGNSNVDIENVMITDEEEIRTTNPVATEQYGVVSDNLQSSNTRPITGDVDSQGVLPGMVWQDRDVYLQGPIWAKIPHTDGHFHPSPLMGGFGLKHPPPQILIKNTPVPANPATTFTPGKFASFITQYSTGQVSVQIEWELQKENSKRWNPEIQYTSNYNKSVNVDFTVDTNGVYSEPRPIGTRYLTRNL

SEQ ID NO: 506 - protein, 736 aa, Adeno-associated virus; identical to SEQ ID NO: 81

SEQ ID NO: 507 - protein, 736 aa, Adeno-associated virus
MAADGYLPDWLEDNLSEGIREWWDLKPGAPKPKANQQKQDDGRGLVLPGYKYLGPFNGLDKGEPVNAADAAALEHDKAYDQQLKAGDNPYLRYNHADAEFQERLQEDTSFGGNLGRAVFQAKKRVLEPLGLVEEGAKTAPGKKRPVEQSPQEPDSSSGIGKTGQQPAKKRLNFGQTGDSESVPDPQPLGEPPAAPSGLGPNTMASGGGAPMADNNEGADGVGNSSGNWHCDSTWLGDRVITTSTRTWALPTYNNHLYKQISNGTSGGSTNDNTYFGYSTPWGYFDFNRFHCHFSPRDWQRLINNNWGFRPKRLNFKLFNIQVKEVTTNEGTKTIANNLTSTVQVFTDSEYQLPYVLGSAHQGCLPPFPADVFMVPQYGYLTLNNGSQALGRSSFYCLEYFPSQMLRTGNNFQFSYTFEDVPFHSSYAHSQSLDRLMNPLIDQYLYYLVRTQTTGTGGTQTLAFSQAGPSSMANQARNWVPGPCYRQQRVSTTTNQNNNSNFAWTGAAKFKLNGRDSLMNPGVAMASHKDDEDRFFPSSGVLIFGKQGAGNDGVDYSQVLITDEEEIKATNPVATEEYGAVAINNQAANTQAQTGLVHNQGVIPGMVWQNRDVYLQGPIWAKIPHTDGNFHPSPLMGGFGLKHPPPQILIKNTPVPADPPLTFNQAKLNSFITQYSTGQVSVEIEWELQKENSKRWNPEIQYTSNYYKSTNVDFAVNTEGVYSEPRPIGTRYLTRNL

SEQ ID NO: 508 - protein, 736 aa, Artificial Sequence; identical to SEQ ID NO: 507
  Description of Artificial Sequence: Synthetic polypeptide

SEQ ID NO: 509 - protein, 736 aa, Artificial Sequence
  Description of Artificial Sequence: Synthetic polypeptide
MAADGYLPDWLEDNLSEGIREWWDLKPGAPKPKANQQKQDDGRGLVLPGYKYLGPFNGLDKGEPVNAADAAALEHDKAYDQQLKAGDNPYLRYNHADAEFQERLQEDTSFGGNLGRAVFQAKKRVLEPLGLVEEGAKTAPGKKRPVEQSPQEPDSSSGIGKTGQQPAKKRLNFGQTGDSESVPDPQPLGEPPAAPSGLGPNTMASGGGAPMADNNEGADGVGNSSGNWHCDSTWLGDRVITTSTRTWALPTYNNHLYKQISNGTSGGSTNDNTYFGYSTPWGYFDFNRFHCHFSPRDWQRLINNNWGFRPKRLNFKLFNIQVKEVTTNEGTKTIANNLTSTVQVFTDSEYQLPYVLGSAHQGCLPPFPADVFMVPQYGYLTLNNGSQALGRSSFYCLEYFPSQMLRTGNNFQFSYTFEDVPFHSSYAHSQSLDRLMNPLIDQYLYYLVRTQTTGTGGTQTLAFSQAGPSSMANQARNWVPGPCYRQQRVSTTTNQNNNSNFAWTGAAKFKLNGRDSLMNPGVAMASHKDDEDRFFPSSGVLIFGKQGAGNDGVDYSQVLITDEEEIKATNPVATEEYGAVAINNQRANTQAQTGLVHNQGVIPGMVWQNRDVYLQGPIWAKIPHTDGNFHPSPLMGGFGLKHPPPQILIKNTPVPADPPLTFNQAKLNSFITQYSTGQVSVEIEWELQKENSKRWNPEIQYTSNYYKSTNVDFAVNTEGVYSEPRPIGTRYLTRNL

SEQ ID NO: 510 - protein, 736 aa, Artificial Sequence
  Description of Artificial Sequence: Synthetic polypeptide
MAADGYLPDWLEDNLSEGIREWWDLKPGAPKPKANQQKQDDGRGLVLPGYKYLGPFNGLDKGEPVNAADAAALEHDKAYDQQLKAGDNPYLRYNHADAEFQERLQEDTSFGGNLGRAVFQAKKRVLEPLGLVEEGAKTAPGKKRPVEQSPQEPDSSSGIGKTGQQPAKKRLNFGQTGDSESVPDPQPLGEPPAAPSGLGPNTMASGGGAPMADNNEGADGVGNSSGNWHCDSTWLGDRVITTSTRTWALPTYNNHLYKQISNGTSGGSTNDNTYFGYSTPWGYFDFNRFHCHFSPRDWQRLINNNWGFRPKRLNFKLFNIQVKEVTTNEGTKTIANNLTSTVQVFTDSEYQLPYVLGSAHQGCLPPFPADVFMVPQYGYLTLNNGSQALGRSSFYCLEYFPSQMLRTGNNFQFSYTFEDVPFHSSYAHSQSLDRLMNPLIDQYLYYLVRTQTTGTGGTQTLAFSQAGPSSMANQARNWVPGPCYRQQRVSTTTNQNNNSNFAWTGAAKFKLNGRDSLMNPGVAMASHKDDEDAFFPSSGVLIFGKQGAGNDGVDYSQVLITDEEEIKATNPVATEEYGAVAINNQAANTQAQTGLVHNQGVIPGMVWQNRDVYLQGPIWAKIPHTDGNFHPSPLMGGFGLKHPPPQILIKNTPVPADPPLTFNQAKLNSFITQYSTGQVSVEIEWELQKENSKRWNPEIQYTSNYYKSTNVDFAVNTEGVYSEPRPIGTRYLTRNL

SEQ ID NO: 511 - DNA, 1803 bp, Bovine adeno-associated virus
acggcgcctgcggcaaaaaagaggcctctagagcagagtcctcaagagccagactcctcgagcggagttggcaagaaaggcaaacagcctgccagaaagagactcaactttgacgacgaacctggagccggagacgggcctcccccagaaggaccatcttccggagctatgtctactgagactgaaatgcgtgcagcagctggcggaaatggtggcgatgcgggacaaggtgccgagggagtgggtaatgcctccggtgattggcattgcgattccacttggtcagagagccacgtcaccaccacctcaacccgcacctgggtcctgccgacctacaacaaccacctgtacctgcggctcggctcgagcaacgccagcgacaccttcaacggattctccaccccctggggatactttgactttaaccgcttccactgccacttctcgccaagagactggcaaaggctcatcaacaaccactggggactgcgccccaaaagcatgcaagtccgcatcttcaacatccaagttaaggaggtcacgacgtctaacggggagacgaccgtatccaacaacctcaccagcacggtccagatctttgcggacagcacgtacgagctcccgtacgtgatggatgcaggtcaggagggcagcttgcctcctttccccaacgacgtgttcatggtgcctcagtacgggtactgcggactggtaaccggaggcagctctcaaaaccagacagacagaaatgccttctactgtctggagtactttcccagccagatgctgagaaccggaaacaactttgagatggtgtacaagtttgaaaacgtgcccttccactccatgtacgctcacagccagagcctggataggctgatgaacccgctgctggaccagtacctgtgggagctccagtctaccacctctggaggaactctcaaccagggcaattcagccaccaactttgccaagctgaccaaaacaaacttttctggctaccgcaaaaactggctcccggggcccatgatgaagcagcagagattctccaagactgccagtcaaaactacaagattccccagggaagaaacaacagtctgctccattatgagaccagaactaccctcgacggaagatggagcaattttgccccgggaacggccatggcaaccgcagccaacgacgccaccgacttctctcaggcccagctcatctttgcggggcccaacatcaccggcaacaccaccacagatgccaataacctgatgttcacttcagaagatgaacttagggccaccaacccccgggacactgacctgtttggccacctggcaaccaaccagcaaaacgccaccaccgttcctaccgtagacgacgtggacggagtcggcgtgtacccgggaatggtgtggcaggacagagacatttactaccaagggcccatttgggccaaaattccacacacggatggacactttcacccgtctcctctcattggcggatttggactgaaaagcccgcctccacaaatattcatcaaaaacactcctgtacccgccaatcccgcaacgaccttctctccggccagaatcaacagcttcatcacccagtacagcaccggacaggtggctgtcaaaatagaatgggaaatccagaaggagcggtccaagagatggaacccagaggtccagttcacgtccaactacggagcacaggactcgcttctctgggctcccgacaacgccggagcctacaaagagcccagggccattggatcccgatacctcaccaaccacctctag

SEQ ID NO: 512 - DNA, 1617 bp, Bovine adeno-associated virus
atgcgtgcagcagctggcggaaatggtggcgatgcgggacaaggtgccgagggagtgggtaatgcctccggtgattggcattgcgattccacttggtcagagagccacgtcaccaccacctcaacccgcacctgggtcctgccgacctacaacaaccacctgtacctgcggctcggctcgagcaacgccagcgacaccttcaacggattctccaccccctggggatactttgactttaaccgcttccactgccacttctcgccaagagactggcaaaggctcatcaacaaccactggggactgcgccccaaaagcatgcaagtccgcatcttcaacatccaagttaaggaggtcacgacgtctaacggggagacgaccgtatccaacaacctcaccagcacggtccagatctttgcggacagcacgtacgagctcccgtacgtgatggatgcaggtcaggagggcagcttgcctcctttccccaacgacgtgttcatggtgcctcagtacgggtactgcggactggtaaccggaggcagctctcaaaaccagacagacagaaatgccttctactgtctggagtactttcccagccagatgctgagaaccggaaacaactttgagatggtgtacaagtttgaaaacgtgcccttccactccatgtacgctcacagccagagcctggataggctgatgaacccgctgctggaccagtacctgtgggagctccagtctaccacctctggaggaactctcaaccagggcaattcagccaccaactttgccaagctgaccaaaacaaacttttctggctaccgcaaaaactggctcccggggcccatgatgaagcagcagagattctccaagactgccagtcaaaactacaagattccccagggaagaaacaacagtctgctccattatgagaccagaactaccctcgacggaagatggagcaattttgccccgggaacggccatggcaaccgcagccaacgacgccaccgacttctctcaggcccagctcatctttgcggggcccaacatcaccggcaacaccaccacagatgccaataacctgatgttcacttcagaagatgaacttagggccaccaacccccgggacactgacctgtttggccacctggcaaccaaccagcaaaacgccaccaccgttcctaccgtagacgacgtggacggagtcggcgtgtacccgggaatggtgtggcaggacagagacatttactaccaagggcccatttgggccaaaattccacacacggatggacactttcacccgtctcctctcattggcggatttggactgaaaagcccgcctccacaaatattcatcaaaaacactcctgtacccgccaatcccgcaacgaccttctctccggccagaatcaacagcttcatcacccagtacagcaccggacaggtggctgtcaaaatagaatgggaaatccagaaggagcggtccaagagatggaacccagaggtccagttcacgtccaactacggagcacaggactcgcttctctgggctcccgacaacgccggagcctacaaagagcccagggccattggatcccgatacctcaccaaccacctctag

SEQ ID NO: 513 - DNA, 1173 bp, Bovine adeno-associated virus
atggcgctggtaagctggctggtggaacatggcatcacttccgagaagcagtggattcaggagaatcaggagagctacctgtccttcaactccacgggaaactctcggagccagattaaagccgcgcttgacaacgcgtcaaaaattatgagtctgaccaaatctgcctcagactatctcgtgggacagactgttccagaggacatttctgaaaacagaatctggcagatttttgatctcaacggctacgacccggcatacgcgggctctgttctctacggctggtgcactcgcgcctttggaaagaggaacaccgtctggctgtatggacccgcgaccaccggaaagaccaacatcgcggaagccatctctcacaccgtgcccttttatggctgtgtgaactggactaatgagaactttccctttaatgactgtgtggaaaaaatgttgatctggtgggaggagggaaagatgaccagcaaggtggtggaacccgccaaggccatcttgggggggtctagagtacgagtggatcaaaaatgtaaatcctctgtacaagtagactctaccccggtgattatcacctccaatactaacatgtgtgtggtggtggatgggaactccacgacctttgaacaccagcagccgctggaagaccgcatgttcagatttgaactcatgcggcggctcccgccagattttggcaagattaccaagcaggaagtcaaagacttttttgcttgggcaaaggtcaaccaggtgccggtgactcacgagtttatggttcccaagaaagtggcgggaactgagagggcggagacttctagaaaacgcccactggatgacgtcaccaataccaactataaaagtccggagaagcgggcccggctctcagttgttcctgagacgcctcgcagttcagacgtgcctgtagagcccgctcctctgcgacctctcaactggtcttccaggtatgaatgcagatgtgactatcatgctaaatttgactctgtaacgggggaatgtgacgagtgtgaatatttgaatcggggcaaaaatggctgtatctttcataatgctacacattgtcaaatttgtcacgctgttcctccatgggaaaaggaaaatgtgtcagattttaatgattttgatgactgtaataaagagcagtaa

SEQ ID NO: 514 - DNA, 1833 bp, Bovine adeno-associated virus
atggctaccttctatgaagtcattgttcgcgttccatttgatgtggaagagcacctgcctggaatttctgacaactttgtagactgggtaactggtcaaatttgggagctgcctcccgagtcagatttgaatttgactctgattgagcagcctcagctgacggtggctgacagaattcgccgcgtgttcctgtacgagtggaacaaattttccaagcaggagagcaaattctttgtgcagtttgaaaagggatctgaatattttcatctgcacacgctcgtggagacctccggcatctcttctatggtccttggccgctacgtgagtcagattcgcgcccagctggtgaaggtggtgttccagaacattgagccgcggattaacgactgggtcgccatcaccaaggtaaagaagggcggagccaataaggtggtggattctgggtatattcccgcctacctgctgccgaaggtccaaccagagcttcagtgggcgtggactaacctcgaagagtataaattggccgccctcaatctggaggagcgcaaacggctcgtcgctcagtttcagcttgagtcctcgcagcgctcgcaagaggcatcttcccagagggacgtttcggctgacccggtcatcaagagcaagacttcccagaaatacatggcgctggtaagctggctggtggaacatggcatcacttccgagaagcagtggattcaggagaatcaggagagctacctgtccttcaactccacgggaaactctcggagccagattaaagccgcgcttgacaacgcgtcaaaaattatgagtctgaccaaatctgcctcagactatctcgtgggacagactgttccagaggacatttctgaaaacagaatctggcagatttttgatctcaacggctacgacccggcatacgcgggctctgttctctacggctggtgcactcgcgcctttggaaagaggaacaccgtctggctgtatggacccgcgaccaccggaaagaccaacatcgcggaagccatctctcacaccgtgcccttttatggctgtgtgaactggactaatgagaactttccctttaatgactgtgtggaaaaaatgttgatctggtgggaggagggaaagatgaccagcaaggtggtggaacccgccaaggccatcttgggggggtctagagtacgagtggatcaaaaatgtaaatcctctgtacaagtagactctaccccggtgattatcacctccaatactaacatgtgtgtggtggtggatgggaactccacgacctttgaacaccagcagccgctggaagaccgcatgttcagatttgaactcatgcggcggctcccgccagattttggcaagattaccaagcaggaagtcaaagacttttttgcttgggcaaaggtcaaccaggtgccggtgactcacgagtttatggttcccaagaaagtggcgggaactgagagggcggagacttctagaaaacgcccactggatgacgtcaccaataccaactataaaagtccggagaagcgggcccggctctcagttgttcctgagacgcctcgcagttcagacgtgcctgtagagcccgctcctctgcgacctctcaactggtcttccaggtatgaatgcagatgtgactatcatgctaaatttgactctgtaacgggggaatgtgacgagtgtgaatatttgaatcggggcaaaaatggctgtatctttcataatgctacacattgtcaaatttgtcacgctgttcctccatgggaaaaggaaaatgtgtcagattttaatgattttgatgactgtaataaagagcagtaa

SEQ ID NO: 515 - DNA, 2211 bp, Bovine adeno-associated virus
atgtcttttgttgaccaccctccagattggttggaatcgatcggcgacggctttcgtgaatttctcggccttgaggcgggtcccccgaaacccaaggccaatcaacagaagcaagataacgctcgaggtcttgtgcttcctgggtacaagtatcttggtcctgggaacggccttgataagggcgatcctgtcaattttgctgacgaggttgcccgagagcacgacctctcctaccagaaacagcttgaggcgggcgataacccttacctcaagtacaaccacgcggacgcagagtttcaggagaaactcgcttctgacacttcttttgggggaaaccttgggaaggctgttttccaggctaaaaagaggattctcgaacctcttggcctggttgagacgccggataaaacggcgcctgcggcaaaaaagaggcctctagagcagagtcctcaagagccagactcctcgagcggagttggcaagaaaggcaaacagcctgccagaaagagactcaactttgacgacgaacctggagccggagacgggcctcccccagaaggaccatcttccggagctatgtctactgagactgaaatgcgtgcagcagctggcggaaatggtggcgatgcgggacaaggtgccgagggagtgggtaatgcctccggtgattggcattgcgattccacttggtcagagagccacgtcaccaccacctcaacccgcacctgggtcctgccgacctacaacaaccacctgtacctgcggctcggctcgagcaacgccagcgacaccttcaacggattctccaccccctggggatactttgactttaaccgcttccactgccacttctcgccaagagactggcaaaggctcatcaacaaccactggggactgcgccccaaaagcatgcaagtccgcatcttcaacatccaagttaaggaggtcacgacgtctaacggggagacgaccgtatccaacaacctcaccagcacggtccagatctttgcggacagcacgtacgagctcccgtacgtgatggatgcaggtcaggagggcagcttgcctcctttccccaacgacgtgttcatggtgcctcagtacgggtactgcggactggtaaccggaggcagctctcaaaaccagacagacagaaatgccttctactgtctggagtactttcccagccagatgctgagaaccggaaacaactttgagatggtgtacaagtttgaaaacgtgcccttccactccatgtacgctcacagccagagcctggataggctgatgaacccgctgctggaccagtacctgtgggagctccagtctaccacctctggaggaactctcaaccagggcaattcagccaccaactttgccaagctgaccaaaacaaacttttctggctaccgcaaaaactggctcccggggcccatgatgaagcagcagagattctccaagactgccagtcaaaactacaagattccccagggaagaaacaacagtctgctccattatgagaccagaactaccctcgacggaagatggagcaattttgccccgggaacggccatggcaaccgcagccaacgacgccaccgacttctctcaggcccagctcatctttgcggggcccaacatcaccggcaacaccaccacagatgccaataacctgatgttcacttcagaagatgaacttagggccaccaacccccgggacactgacctgtttggccacctggcaaccaaccagcaaaacgccaccaccgttcctaccgtagacgacgtggacggagtcggcgtgtacccgggaatggtgtggcaggacagagacatttactaccaagggcccatttgggccaaaattccacacacggatggacactttcacccgtctcctctcattggcggatttggactgaaaagcccgcctccacaaatattcatcaaaaacactcctgtacccgccaatcccgcaacgaccttctctccggccagaatcaacagcttcatcacccagtacagcaccggacaggtggctgtcaaaatagaatgggaaatccagaaggagcggtccaagagatggaacccagaggtccagttcacgtccaactacggagcacaggactcgcttctctgggctcccgacaacgccggagcctacaaagagcccagggccattggatcccgatacctcaccaaccacctctag

SEQ ID NO: 516 - DNA, 4694 bp, Bovine adeno-associated virus
gtggcactcccccccctgtcgcgttcgctcgttcgctggctcgattgggggggtggcagctcaaagagctgccagacgacggccctctgggccgtcgcccccccaatcgagccagcgaacgagcgaacgcgacaggggggggagtgccacactctctagcaagggggttttgtaggtggtgatgtcattgttgatgtcattatagttgtcacgcgatagttaatgattaacagtcatgtgatgtgtgttatccaataggatgaaagcgcgcgaatgagatctcgcgagacttccggggtataaaaggggtgagtgaacgagcccgccgccattctctgctctggactgctagaggaccctcgctgccatggctaccttctatgaagtcattgttcgcgttccatttgatgtggaagagcacctgcctggaatttctgacaactttgtagactgggtaactggtcaaatttgggagctgcctcccgagtcagatttgaatttgactctgattgagcagcctcagctgacggtggctgacagaattcgccgcgtgttcctgtacgagtggaacaaattttccaagcaggagagcaaattctttgtgcagtttgaaaagggatctgaatattttcatctgcacacgctcgtggagacctccggcatctcttctatggtccttggccgctacgtgagtcagattcgcgcccagctggtgaaggtggtgttccagaacattgagccgcggattaacgactgggtcgccatcaccaaggtaaagaagggcggagccaataaggtggtggattctgggtatattcccgcctacctgctgccgaaggtccaaccagagcttcagtgggcgtggactaacctcgaagagtataaattggccgccctcaatctggaggagcgcaaacggctcgtcgctcagtttcagcttgagtcctcgcagcgctcgcaagaggcatcttcccagagggacgtttcggctgacccggtcatcaagagcaagacttcccagaaatacatggcgctggtaagctggctggtggaacatggcatcacttccgagaagcagtggattcaggagaatcaggagagctacctgtccttcaactccacgggaaactctcggagccagattaaagccgcgcttgacaacgcgtcaaaaattatgagtctgaccaaatctgcctcagactatctcgtgggacagactgttccagaggacatttctgaaaacagaatctggcagatttttgatctcaacggctacgacccggcatacgcgggctctgttctctacggctggtgcactcgcgcctttggaaagaggaacaccgtctggctgtatggacccgcgaccaccggaaagaccaacatcgcggaagccatctctcacaccgtgcccttttatggctgtgtgaactggactaatgagaactttccctttaatgactgtgtggaaaaaatgttgatctggtgggaggagggaaagatgaccagcaaggtggtggaacccgccaaggccatcttgggggggtctagagtacgagtggatcaaaaatgtaaatcctctgtacaagtagactctaccccggtgattatcacctccaatactaacatgtgtgtggtggtggatgggaactccacgacctttgaacaccagcagccgctggaagaccgcatgttcagatttgaactcatgcggcggctcccgccagattttggcaagattaccaagcaggaagtcaaagacttttttgcttgggcaaaggtcaaccaggtgccggtgactcacgagtttatggttcccaagaaagtggcgggaactgagagggcggagacttctagaaaacgcccactggatgacgtcaccaataccaactataaaagtccggagaagcgggcccggctctcagttgttcctgagacgcctcgcagttcagacgtgcctgtagagcccgctcctctgcgacctctcaactggtcttccaggtatgaatgcagatgtgactatcatgctaaatttgactctgtaacgggggaatgtgacgagtgtgaatatttgaatcggggcaaaaatggctgtatctttcataatgctacacattgtcaaatttgtcacgctgttcctccatgggaaaaggaaaatgtgtcagattttaatgattttgatgactgtaataaagagcagtaaataaagtgagtagtcatgtcttttgttgaccaccctccagattggttggaatcgatcggcgacggctttcgtgaatttctcggccttgaggcgggtcccccgaaacccaaggccaatcaacagaagcaagataacgctcgaggtcttgtgcttcctgggtacaagtatcttggtcctgggaacggccttgataagggcgatcctgtcaattttgctgacgaggttgcccgagagcacgacctctcctaccagaaacagcttgaggcgggcgataacccttacctcaagtacaaccacgcggacgcagagtttcaggagaaactcgcttctgacacttcttttgggggaaaccttgggaaggctgttttccaggctaaaaagaggattctcgaacctcttggcctggttgagacgccggataaaacggcgcctgcggcaaaaaagaggcctctagagcagagtcctcaagagccagactcctcgagcggagttggcaagaaaggcaaacagcctgccagaaagagactcaactttgacgacgaacctggagccggagacgggcctcccccagaaggaccatcttccggagctatgtctactgagactgaaatgcgtgcagcagctggcggaaatggtggcgatgcgggacaaggtgccgagggagtgggtaatgcctccggtgattggcattgcgattccacttggtcagagagccacgtcaccaccacctcaacccgcacctgggtcctgccgacctacaacaaccacctgtacctgcggctcggctcgagcaacgccagcgacaccttcaacggattctccaccccctggggatactttgactttaaccgcttccactgccacttctcgccaagagactggcaaaggctcatcaacaaccactggggactgcgccccaaaagcatgcaagtccgcatcttcaacatccaagttaaggaggtcacgacgtctaacggggagacgaccgtatccaacaacctcaccagcacggtccagatctttgcggacagcacgtacgagctcccgtacgtgatggatgcaggtcaggagggcagcttgcctcctttccccaacgacgtgttcatggtgcctcagtacgggtactgcggactggtaaccggaggcagctctcaaaaccagacagacagaaatgccttctactgtctggagtactttcccagccagatgctgagaaccggaaacaactttgagatggtgtacaagtttgaaaacgtgcccttccactccatgtacgctcacagccagagcctggataggctgatgaacccgctgctggaccagtacctgtgggagctccagtctaccacctctggaggaactctcaaccagggcaattcagccaccaactttgccaagctgaccaaaacaaacttttctggctaccgcaaaaactggctcccggggcccatgatgaagcagcagagattctccaagactgccagtcaaaactacaagattccccagggaagaaacaacagtctgctccattatgagaccagaactaccctcgacggaagatggagcaattttgccccgggaacggccatggcaaccgcagccaacgacgccaccgacttctctcaggcccagctcatctttgcggggcccaacatcaccggcaacaccaccacagatgccaataacctgatgttcacttcagaagatgaacttagggccaccaacccccgggacactgacctgtttggccacctggcaaccaaccagcaaaacgccaccaccgttcctaccgtagacgacgtggacggagtcggcgtgtacccgggaatggtgtggcaggacagagacatttactaccaagggcccatttgggccaaaattccacacacggatggacactttcacccgtctcctctcattggcggatttggactgaaaagcccgcctccacaaatattcatcaaaaacactcctgtacccgccaatcccgcaacgaccttctctccggccagaatcaacagcttcatcacccagtacagcaccggacaggtggctgtcaaaatagaatgggaaatccagaaggagcggtccaagagatggaacccagaggtccagttcacgtccaactacggagcacaggactcgcttctctgggctcccgacaacgccggagcctacaaagagcccagggccattggatcccgatacctcaccaaccacctctagcccaattctgttgcataccctcaataaaccgtgtattcgtttcagtaaaatactgcctcttgtggtcattcggcgtacaacagcttacaacaacaacaaaacccccttgctagagagtgtggcactcccccccctgtcgcgttcgctcgttcgctggctcgattgggggggtggcagctcaaagagctgccagacgacggccctctgggccgtcgcccccccaatcgagccagcgaacgagcgaacgcgacaggggggggagtgccac

SEQ ID NO: 517 - protein, 390 aa, Bovine adeno-associated virus
MALVSWLVEHGITSEKQWIQENQESYLSFNSTGNSRSQIKAALDNASKIMSLTKSASDYLVGQTVPEDISENRIWQIFDLNGYDPAYAGSVLYGWCTRAFGKRNTVWLYGPATTGKTNIAEAISHTVPFYGCVNWTNENFPFNDCVEKMLIWWEEGKMTSKVVEPAKAILGGSRVRVDQKCKSSVQVDSTPVIITSNTNMCVVVDGNSTTFEHQQPLEDRMFRFELMRRLPPDFGKITKQEVKDFFAWAKVNQVPVTHEFMVPKKVAGTERAETSRKRPLDDVTNTNYKSPEKRARLSVVPETPRSSDVPVEPAPLRPLNWSSRYECRCDYHAKFDSVTGECDECEYLNRGKNGCIFHNATHCQICHAVPPWEKENVSDFNDFDDCNKEQ

SEQ ID NO: 518 - protein, 610 aa, Bovine adeno-associated virus
MATFYEVIVRVPFDVEEHLPGISDNFVDWVTGQIWELPPESDLNLTLIEQPQLTVADRIRRVFLYEWNKFSKQESKFFVQFEKGSEYFHLHTLVETSGISSMVLGRYVSQIRAQLVKVVFQNIEPRINDWVAITKVKKGGANKVVDSGYIPAYLLPKVQPELQWAWTNLEEYKLAALNLEERKRLVAQFQLESSQRSQEASSQRDVSADPVIKSKTSQKYMALVSWLVEHGITSEKQWIQENQESYLSFNSTGNSRSQIKAALDNASKIMSLTKSASDYLVGQTVPEDISENRIWQIFDLNGYDPAYAGSVLYGWCTRAFGKRNTVWLYGPATTGKTNIAEAISHTVPFYGCVNWTNENFPFNDCVEKMLIWWEEGKMTSKVVEPAKAILGGSRVRVDQKCKSSVQVDSTPVIITSNTNMCVVVDGNSTTFEHQQPLEDRMFRFELMRRLPPDFGKITKQEVKDFFAWAKVNQVPVTHEFMVPKKVAGTERAETSRKRPLDDVTNTNYKSPEKRARLSVVPETPRSSDVPVEPAPLRPLNWSSRYECRCDYHAKFDSVTGECDECEYLNRGKNGCIFHNATHCQICHAVPPWEKENVSDFNDFDDCNKEQ

SEQ ID NO: 519 - protein, 538 aa, Bovine adeno-associated virus
MRAAAGGNGGDAGQGAEGVGNASGDWHCDSTWSESHVTTTSTRTWVLPTYNNHLYLRLGSSNASDTFNGFSTPWGYFDFNRFHCHFSPRDWQRLINNHWGLRPKSMQVRIFNIQVKEVTTSNGETTVSNNLTSTVQIFADSTYELPYVMDAGQEGSLPPFPNDVFMVPQYGYCGLVTGGSSQNQTDRNAFYCLEYFPSQMLRTGNNFEMVYKFENVPFHSMYAHSQSLDRLMNPLLDQYLWELQSTTSGGTLNQGNSATNFAKLTKTNFSGYRKNWLPGPMMKQQRFSKTASQNYKIPQGRNNSLLHYETRTTLDGRWSNFAPGTAMATAANDATDFSQAQLIFAGPNITGNTTTDANNLMFTSEDELRATNPRDTDLFGHLATNQQNATTVPTVDDVDGVGVYPGMVWQDRDIYYQGPIWAKIPHTDGHFHPSPLIGGFGLKSPPPQIFIKNTPVPANPATTFSPARINSFITQYSTGQVAVKIEWEIQKERSKRWNPEVQFTSNYGAQDSLLWAPDNAGAYKEPRAIGSRYLTNHL

SEQ ID NO: 520 - protein, 736 aa, Artificial Sequence
  Description of Artificial Sequence: Synthetic polypeptide
MSFVDHPPDWLESIGDGFREFLGLEAGPPKPKANQQKQDNARGLVLPGYKYLGPGNGLDKGDPVNFADEVAREHDLSYQKQLEAGDNPYLKYNHADAEFQEKLASDTSFGGNLGKAVFQAKKRILEPLGLVETPDKTAPAAKKRPLEQSPQEPDSSSGVGKKGKQPARKRLNFDDEPGAGDGPPPEGPSSGAMSTETEMRAAAGGNGGDAGQGAEGVGNASGDWHCDSTWSESHVTTTSTRTWVLPTYNNHLYLRLGSSNASDTFNGFSTPWGYFDFNRFHCHFSPRDWQRLINNHWGLRPKSMQVRIFNIQVKEVTTSNGETTVSNNLTSTVHIFADSTYELPYVMDAGQEGSLPPFPNDVFMVPQYGYCGLVTGGSSQNQTDRNAFYCLEYFPSQMLRTGNNFEMVYKFENVPFHSMYAHSQSLDRLMNPLLDQYLWELQSTTSGGTLNQGNSATNFAKLTNKNFSGYRKNWLPGPMMKQQRFSKTASQNYKIPQGGNNSLLHYETRTTLDRRWSNFAPGTAMATAANDATDFSQAQLIFAGPNITGNTTTDANNLMFTSEDELRATNPRDTDLFGHLATNQQNATTVPTVDDVDGVGVYPGMVWQDRDIYYQGPIWAKIPHTDGHFHPSPLIGGFGLKSPPPQIFIKNTPVPANPATTFSPARINSFITQYSTGQVAVKIEWEIQKERSKRWNPEVQFTSNYGAQDSLLWAPDNAGAYKEPRAIGSRYLTNHL

SEQ ID NO: 521 - protein, 736 aa, Artificial Sequence
  Description of Artificial Sequence: Synthetic polypeptide
MSFVDHPPDWLESIGDGFREFLGLEAGPPKPKANQQKQDNARGLVLPGYKYLGPGNGLDKGDPVNFADEVAREHDLSYQKQLEAGDNPYLKYNHADAEFQEKLASDTSFGGNLGKAVFQAKKRILEPLGLVETPDKTAPAAKKRPLEQSPQEPDSSSGVGKKGKQPARKRLNFDDEPGAGDGPPPEGPSSGAMSTETEMRAAAGGNGGDAGQGAEGVGNASGDWHCDSTWSESHVTTTSTRTWVLPTYNNHLYLRLGSSNASDTFNGFSTPWGYFDFNRFHCHFSPRDWQRLINNHWGLRPKSMQVRIFNIQVKEVTTSNGETTVSNNLTSTVQIFADSTYELPYVMDAGQEGSLPPFPNDVFMVPQYGYCGLVTGGSSQNQTDRNAFYCLEYFPSQMLRTGNNFEMVYKFENVPFHSMYAHSQSLDRLMNPLLDQYLWELQSTTSGGTLNQGNSATNFAKLTKTNFSGYRKNWLPGPMMKQQRFSKTASQNYKIPQGRNNSLLHYETRTTLDGRWSNFAPGTAMATAANDATDFSQAQLIFAGPNITGNTTTDANNLMFTSEDELRATNPRDTDLFGHLATNQQNATTVPTVDDVDGVGVYPGMVWQDRDIYYQGPIWAKIPHTDGHFHPSPLIGGFGLKSPPPQIFIKNTPVPANPATTFSPARINSFITQYSTGQVAVKIEWEIQKERSKRWNPEVQFTSNYGAQDSLLWAPDNAGAYKEPRAIGSRYLTNHL

SEQ ID NO: 522 - protein, 736 aa, Bovine adeno-associated virus; identical to SEQ ID NO: 521

SEQ ID NO: 523 - protein, 600 aa, Bovine adeno-associated virus
TAPAAKKRPLEQSPQEPDSSSGVGKKGKQPARKRLNFDDEPGAGDGPPPEGPSSGAMSTETEMRAAAGGNGGDAGQGAEGVGNASGDWHCDSTWSESHVTTTSTRTWVLPTYNNHLYLRLGSSNASDTFNGFSTPWGYFDFNRFHCHFSPRDWQRLINNHWGLRPKSMQVRIFNIQVKEVTTSNGETTVSNNLTSTVQIFADSTYELPYVMDAGQEGSLPPFPNDVFMVPQYGYCGLVTGGSSQNQTDRNAFYCLEYFPSQMLRTGNNFEMVYKFENVPFHSMYAHSQSLDRLMNPLLDQYLWELQSTTSGGTLNQGNSATNFAKLTKTNFSGYRKNWLPGPMMKQQRFSKTASQNYKIPQGRNNSLLHYETRTTLDGRWSNFAPGTAMATAANDATDFSQAQLIFAGPNITGNTTTDANNLMFTSEDELRATNPRDTDLFGHLATNQQNATTVPTVDDVDGVGVYPGMVWQDRDIYYQGPIWAKIPHTDGHFHPSPLIGGFGLKSPPPQIFIKNTPVPANPATTFSPARINSFITQYSTGQVAVKIEWEIQKERSKRWNPEVQFTSNYGAQDSLLWAPDNAGAYKEPRAIGSRYLTNHL

SEQ ID NO: 524 - DNA, 2214 bp, Artificial Sequence
  Description of Artificial Sequence: Synthetic polynucleotide
atggctgccgatggttatcttccagattggctcgaggacactctctctgaaggaataagacagtggtggaagctcaaacctggcccaccaccaccaaagcccgcagagcggcataaggacgacagcaggggtcttgtgcttcctgggtacaagtacctcggacccttcaacggactcgacaagggagagccggtcaacgaggcagacgccgcggccctcgagcacgacaaagcctacgaccggcagctcgacagcggagacaacccgtacctcaagtacaaccacgccgacgcggagtttcaggagcgccttaaagaagatacgtcttttgggggcaacctcgggcgagcagtcttccaggccaaaaagaggcttcttgaacctcttggtctggttgaggaagcggctaagacggctcctggaaagaagaggcctgtagagcagtctcctcaggaaccggactcctcctcgggcatcggcaagacaggccagcagcccgctaaaaagagactcaatttcggtcagactggcgacacagagtcagtcccagaccctcaaccaatcggagaacctcccgcagccccctcaggtgtgggatctcttacaatggcttcaggtggtggcgcaccagtggcagacaataacgaaggtgccgatggagtgggtagttcctcgggaaattggcattgcgattcccaatggctgggggacagagtcatcaccaccagcacccgaacctgggccctgcccacctacaacaatcacctctacaagcaaatctccaacgggacatcgggaggagccaccaacgacaacacctacttcggctacagcaccccctgggggtattttgactttaacagattccactgccacttttcaccacgtgactggcagcgactcatcaacaacaactggggattccggcccaagagactcagcttcaagctcttcaacatccaggtcaaggaggtcacgcagaatgaaggcaccaagaccatcgccaataaccttaccagcacggtccaggtcttcacggactcggagtaccagctgccgtacgttctcggctctgcccaccagggctgcctgcctccgttcccggcggacgtgttcatgattccccagtacggctacctaacactcaacaacggtagtcaggccgtgggacgctcctccttctactgcctggaatactttccttcgcagatgctgagaaccggcaacaacttccagtttacttacaccttcgaggacgtgcctttccacagcagctacgcccacagccagagcttggaccggctgatgaatcctctgattgaccagtacctgtactacttgtctcggactcaaacaacaggaggcacggcaaatacgcagactctgggcttcagccaaggtgggcctaatacaatggccaatcaggcaaagaactggctgccaggaccctgttaccgccaacaacgcgtctcaacgacaaccgggcaaaacaacaatagcaactttgcctggactgctgggaccaaataccatctgaatggaagaaattcattggctaatcctggcatcgctatggcaacacacaaagacgacaaggagcgtttttttcccagtaacgggatcctgatttttggcaaacaaaatgctgccagagacaatgcggattacagcgatgtcatgctcaccagcgaggaagaaatcaaaaccactaaccctgtggctacagaggaatacggtatcgtggcagataacttgcagcagcaaaacacggctcctcaaattggaactgtcaacagccagggggccttacccggtatggtttggcagaaccgggacgtgtacctgcagggtcccatctgggccaagattcctcacacggacggcaacttccacccgtctccgctgatgggcggctttggcctgaaacatcctccgcctcagatcctgatcaagaacacgcctgtacctgcggatcctccgaccaccttcaaccagtcaaagctgaactctttcatcacgcaatacagcaccggacaggtcagcgtggaaattgaatgggagctgcagaaggaaaacagcaagcgctggaaccccgagatccagtacacctccaactactacaaatctacaagtgtggactttgctgttaatacagaaggcgtgtactctgaaccccaccccattggcacccgttacctcacccgtcccctgtaa

SEQ ID NO: 525 - protein, 737 aa, Artificial Sequence
  Description of Artificial Sequence: Synthetic polypeptide
MAADGYLPDWLEDTLSEGIRQWWKLKPGPPPPKPAERHKDDSRGLVLPGYKYLGPFNGLDKGEPVNEADAAALEHDKAYDRQLDSGDNPYLKYNHADAEFQERLKEDTSFGGNLGRAVFQAKKRLLEPLGLVEEAAKTAPGKKRPVEQSPQEPDSSSGIGKTGQQPAKKRLNFGQTGDTESVPDPQPIGEPPAAPSGVGSLTMASGGGAPVADNNEGADGVGSSSGNWHCDSQWLGDRVITTSTRTWALPTYNNHLYKQISNGTSGGATNDNTYFGYSTPWGYFDFNRFHCHFSPRDWQRLINNNWGFRPKRLSFKLFNIQVKEVTQNEGTKTIANNLTSTVQVFTDSEYQLPYVLGSAHQGCLPPFPADVFMIPQYGYLTLNNGSQAVGRSSFYCLEYFPSQMLRTGNNFQFTYTFEDVPFHSSYAHSQSLDRLMNPLIDQYLYYLSRTQTTGGTANTQTLGFSQGGPNTMANQAKNWLPGPCYRQQRVSTTTGQNNNSNFAWTAGTKYHLNGRNSLANPGIAMATHKDDKERFFPSNGILIFGKQNAARDNADYSDVMLTSEEEIKTTNPVATEEYGIVADNLQQQNTAPQIGTVNSQGALPGMVWQNRDVYLQGPIWAKIPHTDGNFHPSPLMGGFGLKHPPPQILIKNTPVPADPPTTFNQSKLNSFITQYSTGQVSVEIEWELQKENSKRWNPEIQYTSNYYKSTSVDFAVNTEGVYSEPHPIGTRYLTRPL

SEQ ID NO: 526 - protein, 736 aa, Artificial Sequence
  Description of Artificial Sequence: Synthetic polypeptide
MAADGYLPDWLEDNLSEGIREWWDLKPGAPKPKANQQKQDDGRGLVLPGYKYLGPFNGLDKGEPVNAADAAALEHDKAYDQQLKAGDNPYLRYNHADAEFQERLQEDTSFGGNLGRAVFQAKKRVLEPLGLVEEGAKTAPGKKRPVEQSPQEPDSSSGIGKTGQQPAKKRLNFGQTGDTESVPDPQPIGEPPAAPSGVGSLTMASGGGAPVADNNEGADGVGSSSGNWHCDSQWLGDRVITTSTRTWALPTYNNHLYKQISSASTGASNDNHYFGYSTPWGYFDFNRFHCHFSPRDWQRLINNNWGFRPKRLNFKLFNIQVKEVTDNNGVKTIANNLTSTVQVFTDSDYQLPYVLGSAHQGCLPPFPADVFMIPQYGYLTLNNGSQAVGRSSFYCLEYFPSQMLRTGNNFQFTYTFEDVPFHSSYAHSQSLDRLMNPLIDQYLYYLSRTQTTGGTANTQTLGFSQGGPNTMANQAKNWLPGPCYRQQRVSTTTGQNNNSNFAWTAGTKYHLNGRNSLANPGIAMATHKDDKERFFPSNGILIFGKQNAARDNADYSDVMLTSEEEIKTTNPVATEEYGIVADNLQQQNTAPQIGTVNSQGALPGMVWQNRDVYLQGPIWAKIPHTDGNFHPSPLMGGFGLKHPPPQILIKNTPVPADPPTTFNQSKLNSFITQYSTGQVSVEIEWELQKENSKRWNPEIQYTSNYYKSTSVDFAVNTEGVYSEPHPIGTRYLTRPL

SEQ ID NO: 527 - protein, 736 aa, Artificial Sequence
  Description of Artificial Sequence: Synthetic polypeptide
MAADGYLPDWLEDTLSEGIRQWWKLKPGPPPPKPAERHKDDSRGLVLPGYKYLGPFNGLDKGEPVNEADAAALEHDKAYDRQLDSGDNPYLKYNHADAEFQERLQGDTSFGGNLGRAVFQAKKRVLEPLGLVEEGAKTAPGKKRPVEQSPQEPDSSSGIGETGQQPAKKRLNFGQTGDSESVPDPQPLGEPPATPAAVGPTTMASGGGAPMADNNEGADGVGSSSGNWHCDSQWLGDRVITTSTRTWALPTYNNHLYKQISSASTGASNDNHYFGYSTPWGYFDFNRFHCHFSPRDWQRLINNNWGFRPKRLSFKLFNIQVKEVTDNNGVKTIANNLTSTVQVFTDSEYQLPYVLGSAHQGCLPPFPADVFMIPQYGYLTLNNGSQAVGRSSFYCLEYFPSQMLRTGNNFTFSYTFEDVPFHSSYAHSQSLDRLMNPLIDQYLYYLSRTQTTGGTANTQTLGFSQGGPNTMANQAKNWLPGPCYRQQRVSTTTGQNNNSNFAWTAGTKYHLNGRNSLANPGIAMATHKDDKERFFPSNGILIFGKQNAARDNADYSDVMLTSEEEIKTTNPVATEEYGIVADNLQQQNTAPQIGTVNSQGALPGMVWQNRDVYLQGPIWAKIPHTDGNFHPSPLMGGFGLKHPPPQILIKNTPVPADPPTTFNQSKLNSFITQYSTGQVSVEIEWELQKENSKRWNPEIQYTSNYYKSTSVDFAVNTEGVYSEPHPIGTRYLTRPL

SEQ ID NO: 528 - DNA, 2181 bp, Artificial Sequence
  Description of Artificial Sequence: Synthetic polynucleotide
atgtcttttgttgatcaccctccagattggttggaagaagttggtgaaggtcttcgcgagtttttgggccttgaagcgggcccaccgaaaccaaaacccaatcagcagcatcaagatcaagcccgtggtcttgtgctgcctggttataactatctcggacccggaaacggtctcgatcgaggagagcctgtcaacagggcagacgaggtcgcgcgagagcacgacatctcgtacaacgagcagcttgaggcgggagacaacccctacctcaagtacaaccacgcggacgccgagtttcaggagaagctcgccgacgacacatccttcgggggaaacctcggaaaggcagtctttcaggccaagaaaagggttctcgaaccttttggcctggttgaagagggtgctaagacggcccctaccggaaagcggatagacgaccactttccaaaaagaaagaaggctcggaccgaagaggactccaagccttccacctcgtcagacgccgaagctggacccagcggatcccagcagctgcaaatcccagcacaaccagcctcaagtttgggagctgatacaatgtctgcgggaggtggcggcccattgggcgacaataaccaaggtgccgatggagtgggcaatgcctcgggagattggcattgcgattccacgtggatgggggacagagtcgtcaccaagtccacccgcacctgggtgctgcccagctacaacaaccaccagtaccgagagatcaaaagcggctccgtcgacggaagcaacgccaacgcctactttggatacagcaccccctgggggtactttgactttaaccgcttccacagccactggagcccccgagactggcaaagactcatcaacaactattggggcttcagaccccggtctctcagagtcaaaatcttcaacatccaagtcaaagaggtcacggtgcaggactccaccaccaccatcgccaacaacctcacctccaccgtccaagtgtttacggacgacgactaccaactcccgtacgtcgtcggcaacgggaccgagggatgcctgccggccttccccccgcaggtctttacgctgccgcagtacggctacgcgacgctgaaccgagacaacggagacaacccgacagagcggagcagcttcttttgcctagagtactttcccagcaagatgctgaggacgggcaacaactttgagtttacctacagctttgaagaggtgcccttccactgcagcttcgccccgagccagaacctctttaagctggccaacccgctggtggaccagtacctgtaccgcttcgtgagcacctcggccacgggcgccatccagttccaaaagaacctggcgggcagatacgccaacacctacaaaaactggttcccggggcccatgggccgaacccagggctggaacacgagctctggggtcagcagcaccaacagagtcagcgtcaacaacttttccgtctcaaaccggatgaacctggagggggccagctaccaagtgaacccccagcccaacgggatgacaaacacgctccaaggcagcaaccgctacgcgctggaaaacaccatgatcttcaacgctcaaaacgccacgccgggaactacctcggtgtacccagaggacaatctactgctgaccagcgagagcgagactcagcccgtcaaccgggtggcttacaacacgggcggtcagatggccaccaacgcccagaacgccaccacggctcccacggtcgggacctacaacctccaggaagtgcttcctggcagcgtatggatggagagggacgtgtacctccaaggacccatctgggccaagatcccagagacgggggcgcactttcacccctctccggccatgggcggattcggactcaaacacccgccgcccatgatgctcatcaaaaacacgccggtgcccggcaacatcaccagcttctcggacgtgcccgtcagcagcttcatcacccagtacagcaccgggcaggtcaccgtggagatggaatgggagctcaaaaaggaaaactccaagaggtggaacccagagatccagtacaccaacaactacaacgacccccagtttgtggactttgctccagacggctccggcgaatacagaaccaccagagccatcggaacccgatacctcacccgacccctt

SEQ ID NO: 529 - protein, 726 aa, Artificial Sequence
  Description of Artificial Sequence: Synthetic polypeptide
MSFVDHPPDWLEEVGEGLREFLGLEAGPPKPKPNQQHQDQARGLVLPGYNYLGPGNGLDRGEPVNRADEVAREHDISYNEQLEAGDNPYLKYNHADAEFQEKLADDTSFGGNLGKAVFQAKKRVLEPFGLVEEGAKTAPTGKRIDDHFPKRKKARTEEDSKPSTSSDAEAGPSGSQQLQIPAQPASSLGADTMSAGGGGPLGDNNQGADGVGNASGDWHCDSTWMGDRVVTKSTRTWVLPSYNNHQYREIKSGSVDGSNANAYFGYSTPWGYFDFNRFHSHWSPRDWQRLINNYWGFRPRSLRVKIFNIQVKEVTVQDSTTTIANNLTSTVQVFTDDDYQLPYVVGNGTEGCLPAFPPQVFTLPQYGYATLNRDNGDNPTERSSFFCLEYFPSKMLRTGNNFEFTYSFEEVPFHCSFAPSQNLFKLANPLVDQYLYRFVSTSATGAIQFQKNLAGRYANTYKNWFPGPMGRTQGWNTSSGSSTNRVSVNNFSVSNRMNLEGASYQVNPQPNGMTNTLQGSNRYALENTMIFNAQNATPGTTSVYPEDNLLLTSESETQPVNRVAYNTGGQMATNAQNATTAPTVGTYNLQEVLPGSVWMERDVYLQGPIWAKIPETGAHFHPSPAMGGFGLKHPPPMMLIKNTPVPGNITSFSDVPVSSFITQYSTGQVTVEMEWELKKENSKRWNPEIQYTNNYNDPQFVDFAPDGSGEYRTTRAIGTRYLTRPL

SEQ ID NO: 530 - protein, 735 aa, Artificial Sequence
  Description of Artificial Sequence: Synthetic polypeptide
MAADGYLPDWLEDTLSEGIRQWWKLKPGPPPPKPAERHKDDSRGLVLPGYKYLGPFNGLDKGEPVNEADAAALEHDKAYDRQLDSGDNPYLKYNHADAEFQERLKEDTSFGGNLGRAVFQAKKRILEPLGLVEEPVKTAPGKKRPVEHSPAEPDSSSGTGKSGQQPARKRLNFGQTGDADSVPDPQPLGQPPAAPSGLGTNTMASGSGAPMADNNEGADGVGNSSGNWHCDSTWMGDRVITTSTRTWALPTYNNHLYKQISSQSGASNDNHYFGYSTPWGYFDFNRFHCHFSPRDWQRLINNNWGFRPKRLSFKLFNIQVKEVTQNDGTTTIANNLTSTVQVFTDSEYQLPYVLGSAHQGCLPPFPADVFMVPQYGYLTLNNGSQAVGRSSFYCLEYFPSQMLRTGNNFTFSYTFEDVPFHSSYAHSQSLDRLMNPLIDQYLYYLSRTNTPSGTTTMSRLQFSQAGASDIRDQSRNWLPGPCYRQQRVSKTAADNNNSDYSWTGATKYHLNGRDSLVNPGPAMASHKDDEEKYFPQSGVLIFGKQDSGKTNVDIEKVMITDEEEIRTTNPVATEQYGSVSTNLQSGNTQAATSDVNTQGVLPGMVWQDRDVYLQGPIWAKIPHTDGHFHPSPLMGGFGLKHPPPQILIKNTPVPANPSTTFSAAKFASFITQYSTGQVSVEIEWELQKENSKRWNPEIQYTSNYNKSVNVDFTVDTNGVYSEPRPIGTRYLTRNL

SEQ ID NO: 531 - DNA, 1797 bp, Artificial Sequence
  Description of Artificial Sequence: Synthetic polynucleotide
acggctccgaccggagacaagcggaaaggcgaagacgaacctcgtttgcccgacacttcttcacagactcccaagaaaaacaagaagcctcgcaaggaaagaccttccggcggggcagaagatccgggcgaaggcacctcttccaacgctggagcagcagcacccgcctctagtgtgggatcatctatcatggctgaaggaggtggcggcccagtgggcgatgcaggccagggtgccgatggagtgggcaattcctccggaaattggcattgcgattcccaatggctggaaaacggagtcgtcactcgaaccacccgaacctgggtcttgcccagctacaacaaccacctgtacaaacgaatccaaggacccagcggaggcgacaacaacaacaaattctttggattcagcaccccctggggatactttgactacaatcgattccactgccacttttccccgcgagactggcaacgactcatcaacaacaactggggcatccgtcccaaagcgatgcgctttagactctttaacatccaggttaaagaggtcacggtccaagacttcaacaccaccatcggcaacaacctcaccagtacggtccaggtctttgcggacaaggactaccaactgccgtacgtcctcggatcggctaccgaaggcaccttcccgccgttcccagcggatatctacacgatcccgcagtacgggtactgcacgctaaactacaacaacgaggcggtggatcgttcggccttctactgtctggactactttccctcagacatgctgcggacaggaaataactttgagtttacttacaccttcgaggacgttcctttccatagcatgtttgcccacaaccagacgctagaccggctgatgaatcccctcgtggatcagtacctctgggctttcagctccgtcagccaagcaggctcatctggacgagctcttcattactcgcgggcgactaaaaccaacatggcggctcaatataggaactggttacctgggcctttcttccgtgatcagcaaatctttacgggcgctagcaacatcactaaaaataacgtctttagcgtttgggaaaaaggcaagcaatgggaactcgacaatcggaccaacctaatgcagcccggtcctgcggcagcgaccacctttagcggagaacctgaccgtcaagccatgcaaaacacgctggcttttagcaggaccgtctacgatcaaacgaccgccacgaccgatcgtaaccagatactcatcaccaacgaagacgaaatcagacccaccaactcggtcggtatcgacgcgtggggagcagttcccaccaacaaccagtcgatcgtgacccccggcactcgcgcggccgtcaacaatcaaggggcgcttcccgggatggtgtggcaaaacagagacatttaccctacagggacccatttggccaaaattcccgacactgacaatcacttccatccgtccccgcttattgggcggtttggctgcaagcatccccctccccagattttcattaaaaacacacccgtccctgccaacccttcggaaacgttccagacggccaaagtggcctccttcatcaaccagtactcgaccggacagtgcaccgtcgaaatcttttgggaactcaagaaggaaacctccaagcgctggaaccccgaaatccagttcacctccaactttggcaacgcggccgacatccagtttgccgtctccgacacgggatcctattccgaacctcgtcccatcggtacccgttaccttaccaaacctctgtaa

SEQ ID NO: 532 - DNA, 1989 bp, Artificial Sequence
  Description of Artificial Sequence: Synthetic polynucleotide
atgaggtcgtactacgaggtcatcgttcagctgcccaacgacgtcgagagtcaggtacctggaatctccgattcgttcgtcaactggattacgtcgcgagaatggacgttgcctgaggacgccgattgggatttggaccaggtcgatcaagttcaactgacgctcggcgacaaaatccaacgggagattcgaactcattgggggacgatggccaaagaaccggactttcactattttatccaactggaacaaggtgaggtgttctttcatttacacgtcctgctggaaacgtgttccgtaaagccgatggtactcggaagatatatccgacatattcaacaaaaaattgtgagtaaagtctactgcgccacgagcctacgatggaaggatggatgcgtggtgaccaagaccaaaaatttcgggggcgcgaacaaggtccgggccgagtcgtatattcccgcctacctgatcccgaaacagcaaccggaagtgcagtgggcgtggactaacgtgcccgagtatataaaagcgtgcttgcaccgagaactgcgtgccagtctcgcgcgacttcacttcgaggaggcgggcgtctcgcaatccaaggaaaatctcgcgagaactgcagacggcgctcccgtgatgccgacccgcgtcagcaaacgctacatggagctcgtggattggctcgtggagaaggggatcaccaccgagaaggaatggctgctggaaaacagagaaagctttcggagctttcaggcctcgagcaactcggcgcgtcagatcaagacggccctgcaaggcgccattcaggagatgcttctgaccaagacggcggaggactacctcgtcggaaaggatcccgtctcggacgacgacatccgtcagaaccgcatctacaagattctggaactgaaccactacgacccagcgtacgtggggagtattttggtcgggtggtgccagaagaaatggggcaagcgaaacacgctgtggctgttcggacatgcgaccaccggcaagaccaacatcgcggaggctattgcccatgctgtgccgttctatggatgcgttaactggaccaacgagaactttccgttcaacgactgcgtcgaaaaaatgattatctggtgggaggagggcaaaatgaccgccaaagtggtggaaacagccaaggcgattctgggaggatctcgggtgagagtggaccaaaaatgcaaagcttcggttccgatcgaaccgacgccggtcattattaccagtaacaccaacatgtgttatgtcatcgacgggaacacgaccacgttcgagcataagcagccgttggaggacaggatgtttaagctcgaattgctgactcggttgcctgatgactttggtaaggtgaccaaacaggaggtgcgtcaattcttcaggtggtctcaggatcacctgacccctgtgatcccagaattcctagtgcggaaggcggagtctcgcaaaagacccgccccttccggggaaggctatataagcccgacaaagcggcccgcgctcgcagagcagcagcaggcgtcggagagcgcggacccggttcccaccaggtatcgtatcaaatgctcgaaacattgcggtatggataaaatgttgtttccttgccaaatttgtgaatcgatgaacagagatattaatatttgtgctattcataaaacgaccgactgtaaagagtgtttccccgactacggggataaagatgatgtagaactacccccctgtacagaacacaacgtgtctcgttgttatcaatgtcattcgggcgaattgtatcgcgtgacttcggactctgacgagaaacctgcccccgagagtgatgaaggcaccgagccatcctatgctccctgcacgattcaccacctgatgggcaagagtcacgggttagtcacttgcgcggcgtgtcggttgaaaaatagtacgttgcatgatgacttggatgacggtgatctcgaacaataa

SEQ ID NO: 533 - DNA, 1626 bp, Artificial Sequence
  Description of Artificial Sequence: Synthetic polynucleotide
atgaggtcgtactacgaggtcatcgttcagctgcccaacgacgtcgagagtcaggtacctggaatctccgattcgttcgtcaactggattacgtcgcgagaatggacgttgcctgaggacgccgattgggatttggaccaggtcgatcaagttcaactgacgctcggcgacaaaatccaacgggagattcgaactcattgggggacgatggccaaagaaccggactttcactattttatccaactggaacaaggtgaggtgttctttcatttacacgtcctgctggaaacgtgttccgtaaagccgatggtactcggaagatatatccgacatattcaacaaaaaattgtgagtaaagtctactgcgccacgagcctacgatggaaggatggatgcgtggtgaccaagaccaaaaatttcgggggcgcgaacaaggtccgggccgagtcgtatattcccgcctacctgatcccgaaacagcaaccggaagtgcagtgggcgtggactaacgtgcccgagtatataaaagcgtgcttgcaccgagaactgcgtgccagtctcgcgcgacttcacttcgaggaggcgggcgtctcgcaatccaaggaaaatctcgcgagaactgcagacggcgctcccgtgatgccgacccgcgtcagcaaacgctacatggagctcgtggattggctcgtggagaaggggatcaccaccgagaaggaatggctgctggaaaacagagaaagctttcggagctttcaggcctcgagcaactcggcgcgtcagatcaagacggccctgcaaggcgccattcaggagatgcttctgaccaagacggcggaggactacctcgtcggaaaggatcccgtctcggacgacgacatccgtcagaaccgcatctacaagattctggaactgaaccactacgacccagcgtacgtggggagtattttggtcgggtggtgccagaagaaatggggcaagcgaaacacgctgtggctgttcggacatgcgaccaccggcaagaccaacatcgcggaggctattgcccatgctgtgccgttctatggatgcgttaactggaccaacgagaactttccgttcaacgactgcgtcgaaaaaatgattatctggtgggaggagggcaaaatgaccgccaaagtggtggaaacagccaaggcgattctgggaggatctcgggtgagagtggaccaaaaatgcaaagcttcggttccgatcgaaccgacgccggtcattattaccagtaacaccaacatgtgttatgtcatcgacgggaacacgaccacgttcgagcataagcagccgttggaggacaggatgtttaagctcgaattgctgactcggttgcctgatgactttggtaaggtgaccaaacaggaggtgcgtcaattcttcaggtggtctcaggatcacctgacccctgtgatcccagaattcctagtgcggaaggcggagtctcgcaaaagacccgccccttccggggaaggctatataagcccgacaaagcggcccgcgctcgcagagcagcagcaggcgtcggagagcgcggacccggttcccaccagattggttggagcggttggtcaaaaagggagtgaatgctgcagctga

SEQ ID NO: 534 - DNA, 1323 bp, Artificial Sequence
  Description of Artificial Sequence: Synthetic polynucleotide
atggagctcgtggattggctcgtggagaaggggatcaccaccgagaaggaatggctgctggaaaacagagaaagctttcggagctttcaggcctcgagcaactcggcgcgtcagatcaagacggccctgcaaggcgccattcaggagatgcttctgaccaagacggcggaggactacctcgtcggaaaggatcccgtctcggacgacgacatccgtcagaaccgcatctacaagattctggaactgaaccactacgacccagcgtacgtggggagtattttggtcgggtggtgccagaagaaatggggcaagcgaaacacgctgtggctgttcggacatgcgaccaccggcaagaccaacatcgcggaggctattgcccatgctgtgccgttctatggatgcgttaactggaccaacgagaactttccgttcaacgactgcgtcgaaaaaatgattatctggtgggaggagggcaaaatgaccgccaaagtggtggaaacagccaaggcgattctgggaggatctcgggtgagagtggaccaaaaatgcaaagcttcggttccgatcgaaccgacgccggtcattattaccagtaacaccaacatgtgttatgtcatcgacgggaacacgaccacgttcgagcataagcagccgttggaggacaggatgtttaagctcgaattgctgactcggttgcctgatgactttggtaaggtgaccaaacaggaggtgcgtcaattcttcaggtggtctcaggatcacctgacccctgtgatcccagaattcctagtgcggaaggcggagtctcgcaaaagacccgccccttccggggaaggctatataagcccgacaaagcggcccgcgctcgcagagcagcagcaggcgtcggagagcgcggacccggttcccaccaggtatcgtatcaaatgctcgaaacattgcggtatggataaaatgttgtttccttgccaaatttgtgaatcgatgaacagagatattaatatttgtgctattcataaaacgaccgactgtaaagagtgtttccccgactacggggataaagatgatgtagaactacccccctgtacagaacacaacgtgtctcgttgttatcaatgtcattcgggcgaattgtatcgcgtgacttcggactctgacgagaaacctgcccccgagagtgatgaaggcaccgagccatcctatgctccctgcacgattcaccacctgatgggcaagagtcacgggttagtcacttgcgcggcgtgtcggttgaaaaatagtacgttgcatgatgacttggatgacggtgatctcgaacaataa

SEQ ID NO: 535 - DNA, 960 bp, Artificial Sequence
  Description of Artificial Sequence: Synthetic polynucleotide
atggagctcgtggattggctcgtggagaaggggatcaccaccgagaaggaatggctgctggaaaacagagaaagctttcggagctttcaggcctcgagcaactcggcgcgtcagatcaagacggccctgcaaggcgccattcaggagatgcttctgaccaagacggcggaggactacctcgtcggaaaggatcccgtctcggacgacgacatccgtcagaaccgcatctacaagattctggaactgaaccactacgacccagcgtacgtggggagtattttggtcgggtggtgccagaagaaatggggcaagcgaaacacgctgtggctgttcggacatgcgaccaccggcaagaccaacatcgcggaggctattgcccatgctgtgccgttctatggatgcgttaactggaccaacgagaactttccgttcaacgactgcgtcgaaaaaatgattatctggtgggaggagggcaaaatgaccgccaaagtggtggaaacagccaaggcgattctgggaggatctcgggtgagagtggaccaaaaatgcaaagcttcggttccgatcgaaccgacgccggtcattattaccagtaacaccaacatgtgttatgtcatcgacgggaacacgaccacgttcgagcataagcagccgttggaggacaggatgtttaagctcgaattgctgactcggttgcctgatgactttggtaaggtgaccaaacaggaggtgcgtcaattcttcaggtggtctcaggatcacctgacccctgtgatcccagaattcctagtgcggaaggcggagtctcgcaaaagacccgccccttccggggaaggctatataagcccgacaaagcggcccgcgctcgcagagcagcagcaggcgtcggagagcgcggacccggttcccaccagattggttggagcggttggtcaaaaagggagtgaatgctgcagctga

SEQ ID NO: 536 - DNA, 1608 bp, Artificial Sequence
  Description of Artificial Sequence: Synthetic polynucleotide
atggctgaaggaggtggcggcccagtgggcgatgcaggccagggtgccgatggagtgggcaattcctccggaaattggcattgcgattcccaatggctggaaaacggagtcgtcactcgaaccacccgaacctgggtcttgcccagctacaacaaccacctgtacaaacgaatccaaggacccagcggaggcgacaacaacaacaaattctttggattcagcaccccctggggatactttgactacaatcgattccactgccacttttccccgcgagactggcaacgactcatcaacaacaactggggcatccgtcccaaagcgatgcgctttagactctttaacatccaggttaaagaggtcacggtccaagacttcaacaccaccatcggcaacaacctcaccagtacggtccaggtctttgcggacaaggactaccaactgccgtacgtcctcggatcggctaccgaaggcaccttcccgccgttcccagcggatatctacacgatcccgcagtacgggtactgcacgctaaactacaacaacgaggcggtggatcgttcggccttctactgtctggactactttccctcagacatgctgcggacaggaaataactttgagtttacttacaccttcgaggacgttcctttccatagcatgtttgcccacaaccagacgctagaccggctgatgaatcccctcgtggatcagtacctctgggctttcagctccgtcagccaagcaggctcatctggacgagctcttcattactcgcgggcgactaaaaccaacatggcggctcaatataggaactggttacctgggcctttcttccgtgatcagcaaatctttacgggcgctagcaacatcactaaaaataacgtctttagcgtttgggaaaaaggcaagcaatgggaactcgacaatcggaccaacctaatgcagcccggtcctgcggcagcgaccacctttagcggagaacctgaccgtcaagccatgcaaaacacgctggcttttagcaggaccgtctacgatcaaacgaccgccacgaccgatcgtaaccagatactcatcaccaacgaagacgaaatcagacccaccaactcggtcggtatcgacgcgtggggagcagttcccaccaacaaccagtcgatcgtgacccccggcactcgcgcggccgtcaacaatcaaggggcgcttcccgggatggtgtggcaaaacagagacatttaccctacagggacccatttggccaaaattcccgacactgacaatcacttccatccgtccccgcttattgggcggtttggctgcaagcatccccctccccagattttcattaaaaacacacccgtccctgccaacccttcggaaacgttccagacggccaaagtggcctccttcatcaaccagtactcgaccggacagtgcaccgtcgaaatcttttgggaactcaagaaggaaacctccaagcgctggaaccccgaaatccagttcacctccaactttggcaacgcggccgacatccagtttgccgtctccgacacgggatcctattccgaacctcgtcccatcggtacccgttaccttaccaaacctctgtaa

SEQ ID NO: 537 - DNA, 2232 bp, Artificial Sequence
  Description of Artificial Sequence: Synthetic polynucleotide
atgtctctcatttctgatgcgattccagattggttggagcggttggtcaaaaagggagtgaatgctgcagctgatttctaccatttggaaagcggtcctcctcgtcctaaggcaaatcagcaaactcaagaatctcttgaaaaggacgattcgagaggtctcgtgttcccaggctacaattatctaggccctttcaacggtctagataaaggagaacccgtcaacgaggcagacgctgccgccttagaacacgacaaggcttacgacctcgaaatcaaggacgggcacaacccgtactttgagtacaacgaggccgacagacgtttccaggaacgtctcaaagacgatacctcctttggaggcaatttaggtaaagccatcttccaggccaaaaagagggttctcgaaccctttggtctggtggaagactcaaagacggctccgaccggagacaagcggaaaggcgaagacgaacctcgtttgcccgacacttcttcacagactcccaagaaaaacaagaagcctcgcaaggaaagaccttccggcggggcagaagatccgggcgaaggcacctcttccaacgctggagcagcagcacccgcctctagtgtgggatcatctatcatggctgaaggaggtggcggcccagtgggcgatgcaggccagggtgccgatggagtgggcaattcctccggaaattggcattgcgattcccaatggctggaaaacggagtcgtcactcgaaccacccgaacctgggtcttgcccagctacaacaaccacctgtacaaacgaatccaaggacccagcggaggcgacaacaacaacaaattctttggattcagcaccccctggggatactttgactacaatcgattccactgccacttttccccgcgagactggcaacgactcatcaacaacaactggggcatccgtcccaaagcgatgcgctttagactctttaacatccaggttaaagaggtcacggtccaagacttcaacaccaccatcggcaacaacctcaccagtacggtccaggtctttgcggacaaggactaccaactgccgtacgtcctcggatcggctaccgaaggcaccttcccgccgttcccagcggatatctacacgatcccgcagtacgggtactgcacgctaaactacaacaacgaggcggtggatcgttcggccttctactgtctggactactttccctcagacatgctgcggacaggaaataactttgagtttacttacaccttcgaggacgttcctttccatagcatgtttgcccacaaccagacgctagaccggctgatgaatcccctcgtggatcagtacctctgggctttcagctccgtcagccaagcaggctcatctggacgagctcttcattactcgcgggcgactaaaaccaacatggcggctcaatataggaactggttacctgggcctttcttccgtgatcagcaaatctttacgggcgctagcaacatcactaaaaataacgtctttagcgtttgggaaaaaggcaagcaatgggaactcgacaatcggaccaacctaatgcagcccggtcctgcggcagcgaccacctttagcggagaacctgaccgtcaagccatgcaaaacacgctggcttttagcaggaccgtctacgatcaaacgaccgccacgaccgatcgtaaccagatactcatcaccaacgaagacgaaatcagacccaccaactcggtcggtatcgacgcgtggggagcagttcccaccaacaaccagtcgatcgtgacccccggcactcgcgcggccgtcaacaatcaaggggcgcttcccgggatggtgtggcaaaacagagacatttaccctacagggacccatttggccaaaattcccgacactgacaatcacttccatccgtccccgcttattgggcggtttggctgcaagcatccccctccccagattttcattaaaaacacacccgtccctgccaacccttcggaaacgttccagacggccaaagtggcctccttcatcaaccagtactcgaccggacagtgcaccgtcgaaatcttttgggaactcaagaaggaaacctccaagcgctggaaccccgaaatccagttcacctccaactttggcaacgcggccgacatccagtttgccgtctccgacacgggatcctattccgaacctcgtcccatcggtacccgttaccttaccaaacctctgtaa

SEQ ID NO: 538 - protein, 535 aa, Artificial Sequence
  Description of Artificial Sequence: Synthetic polypeptide
MAEGGGGPVGDAGQGADGVGNSSGNWHCDSQWLENGVVTRTTRTWVLPSYNNHLYKRIQGPSGGDNNNKFFGFSTPWGYFDYNRFHCHFSPRDWQRLINNNWGIRPKAMRFRLFNIQVKEVTVQDFNTTIGNNLTSTVQVFADKDYQLPYVLGSATEGTFPPFPADIYTIPQYGYCTLNYNNEAVDRSAFYCLDYFPSDMLRTGNNFEFTYTFEDVPFHSMFAHNQTLDRLMNPLVDQYLWAFSSVSQAGSSGRALHYSRATKTNMAAQYRNWLPGPFFRDQQIFTGASNITKNNVFSVWEKGKQWELDNRTNLMQPGPAAATTFSGEPDRQAMQNTLAFSRTVYDQTTATTDRNQILITNEDEIRPTNSVGIDAWGAVPTNNQSIVTPGTRAAVNNQGALPGMVWQNRDIYPTGTHLAKIPDTDNHFHPSPLIGRFGCKHPPPQIFIKNTPVPANPSETFQTAKVASFINQYSTGQCTVEIFWELKKETSKRWNPEIQFTSNFGNAADIQFAVSDTGSYSEPRPIGTRYLTKPL

SEQ ID NO: 539 - protein, 440 aa, Artificial Sequence
  Description of Artificial Sequence: Synthetic polypeptide
MELVDWLVEKGITTEKEWLLENRESFRSFQASSNSARQIKTALQGAIQEMLLTKTAEDYLVGKDPVSDDDIRQNRIYKILELNHYDPAYVGSILVGWCQKKWGKRNTLWLFGHATTGKTNIAEAIAHAVPFYGCVNWTNENFPFNDCVEKMIIWWEEGKMTAKVVETAKAILGGSRVRVDQKCKASVPIEPTPVIITSNTNMCYVIDGNTTTFEHKQPLEDRMFKLELLTRLPDDFGKVTKQEVRQFFRWSQDHLTPVIPEFLVRKAESRKRPAPSGEGYISPTKRPALAEQQQASESADPVPTRYRIKCSKHCGMDKMLFPCQICESMNRDINICAIHKTTDCKECFPDYGDKDDVELPPCTEHNVSRCYQCHSGELYRVTSDSDEKPAPESDEGTEPSYAPCTIHHLMGKSHGLVTCAACRLKNSTLHDDLDDGDLEQ

SEQ ID NO: 540 - protein, 319 aa, Artificial Sequence
  Description of Artificial Sequence: Synthetic polypeptide
MELVDWLVEKGITTEKEWLLENRESFRSFQASSNSARQIKTALQGAIQEMLLTKTAEDYLVGKDPVSDDDIRQNRIYKILELNHYDPAYVGSILVGWCQKKWGKRNTLWLFGHATTGKTNIAEAIAHAVPFYGCVNWTNENFPFNDCVEKMIIWWEEGKMTAKVVETAKAILGGSRVRVDQKCKASVPIEPTPVIITSNTNMCYVIDGNTTTFEHKQPLEDRMFKLELLTRLPDDFGKVTKQEVRQFFRWSQDHLTPVIPEFLVRKAESRKRPAPSGEGYISPTKRPALAEQQQASESADPVPTRLVGAVGQKGSECCS

SEQ ID NO: 541 - protein, 662 aa, Artificial Sequence
  Description of Artificial Sequence: Synthetic polypeptide
MRSYYEVIVQLPNDVESQVPGISDSFVNWITSREWTLPEDADWDLDQVDQVQLTLGDKIQREIRTHWGTMAKEPDFHYFIQLEQGEVFFHLHVLLETCSVKPMVLGRYIRHIQQKIVSKVYCATSLRWKDGCVVTKTKNFGGANKVRAESYIPAYLIPKQQPEVQWAWTNVPEYIKACLHRELRASLARLHFEEAGVSQSKENLARTADGAPVMPTRVSKRYMELVDWLVEKGITTEKEWLLENRESFRSFQASSNSARQIKTALQGAIQEMLLTKTAEDYLVGKDPVSDDDIRQNRIYKILELNHYDPAYVGSILVGWCQKKWGKRNTLWLFGHATTGKTNIAEAIAHAVPFYGCVNWTNENFPFNDCVEKMIIWWEEGKMTAKVVETAKAILGGSRVRVDQKCKASVPIEPTPVIITSNTNMCYVIDGNTTTFEHKQPLEDRMFKLELLTRLPDDFGKVTKQEVRQFFRWSQDHLTPVIPEFLVRKAESRKRPAPSGEGYISPTKRPALAEQQQASESADPVPTRYRIKCSKHCGMDKMLFPCQICESMNRDINICAIHKTTDCKECFPDYGDKDDVELPPCTEHNVSRCYQCHSGELYRVTSDSDEKPAPESDEGTEPSYAPCTIHHLMGKSHGLVTCAACRLKNSTLHDDLDDGDLEQ

SEQ ID NO: 542 - protein, 541 aa, Artificial Sequence
  Description of Artificial Sequence: Synthetic polypeptide
MRSYYEVIVQLPNDVESQVPGISDSFVNWITSREWTLPEDADWDLDQVDQVQLTLGDKIQREIRTHWGTMAKEPDFHYFIQLEQGEVFFHLHVLLETCSVKPMVLGRYIRHIQQKIVSKVYCATSLRWKDGCVVTKTKNFGGANKVRAESYIPAYLIPKQQPEVQWAWTNVPEYIKACLHRELRASLARLHFEEAGVSQSKENLARTADGAPVMPTRVSKRYMELVDWLVEKGITTEKEWLLENRESFRSFQASSNSARQIKTALQGAIQEMLLTKTAEDYLVGKDPVSDDDIRQNRIYKILELNHYDPAYVGSILVGWCQKKWGKRNTLWLFGHATTGKTNIAEAIAHAVPFYGCVNWTNENFPFNDCVEKMIIWWEEGKMTAKVVETAKAILGGSRVRVDQKCKASVPIEPTPVIITSNTNMCYVIDGNTTTFEHKQPLEDRMFKLELLTRLPDDFGKVTKQEVRQFFRWSQDHLTPVIPEFLVRKAESRKRPAPSGEGYISPTKRPALAEQQQASESADPVPTRLVGAVGQKGSECCS

SEQ ID NO: 543 - protein, 743 aa, Artificial Sequence
  Description of Artificial Sequence: Synthetic polypeptide
MSLISDAIPDWLERLVKKGVNAAADFYHLESGPPRPKANQQTQESLEKDDSRGLVFPGYNYLGPFNGLDKGEPVNEADAAALEHDKAYDLEIKDGHNPYFEYNEADRRFQERLKDDTSFGGNLGKAIFQAKKRVLEPFGLVEDSKTAPTGDKRKGEDEPRLPDTSSQTPKKNKKPRKERPSGGAEDPGEGTSSNAGAAAPASSVGSSIMAEGGGGPVGDAGQGADGVGNSSGNWHCDSQWLENGVVTRTTRTWVLPSYNNHLYKRIQGPSGGDNNNKFFGFSTPWGYFDYNRFHCHFSPRDWQRLINNNWGIRPKAMRFRLFNIQVKEVTVQDFNTTIGNNLTSTVQVFADKDYQLPYVLGSATEGTFPPFPADIYTIPQYGYCTLNYNNEAVDRSAFYCLDYFPSDMLRTGNNFEFTYTFEDVPFHSMFAHNQTLDRLMNPLVDQYLWAFSSVSQAGSSGRALHYSRATKTNMAAQYRNWLPGPFFRDQQIFTGASNITKNNVFSVWEKGKQWELDNRTNLMQPGPAAATTFSGEPDRQAMQNTLAFSRTVYDQTTATTDRNQILITNEDEIRPTNSVGIDAWGAVPTNNQSIVTPGTRAAVNNQGALPGMVWQNRDIYPTGTHLAKIPDTDNHFHPSPLIGRFGCKHPPPQIFIKNTPVPANPSETFQTAKVASFINQYSTGQCTVEIFWELKKETSKRWNPEIQFTSNFGNAADIQFAVSDTGSYSEPRPIGTRYLTKPL

SEQ ID NO: 544 - protein, 598 aa, Artificial Sequence
  Description of Artificial Sequence: Synthetic polypeptide
TAPTGDKRKGEDEPRLPDTSSQTPKKNKKPRKERPSGGAEDPGEGTSSNAGAAAPASSVGSSIMAEGGGGPVGDAGQGADGVGNSSGNWHCDSQWLENGVVTRTTRTWVLPSYNNHLYKRIQGPSGGDNNNKFFGFSTPWGYFDYNRFHCHFSPRDWQRLINNNWGIRPKAMRFRLFNIQVKEVTVQDFNTTIGNNLTSTVQVFADKDYQLPYVLGSATEGTFPPFPADIYTIPQYGYCTLNYNNEAVDRSAFYCLDYFPSDMLRTGNNFEFTYTFEDVPFHSMFAHNQTLDRLMNPLVDQYLWAFSSVSQAGSSGRALHYSRATKTNMAAQYRNWLPGPFFRDQQIFTGASNITKNNVFSVWEKGKQWELDNRTNLMQPGPAAATTFSGEPDRQAMQNTLAFSRTVYDQTTATTDRNQILITNEDEIRPTNSVGIDAWGAVPTNNQSIVTPGTRAAVNNQGALPGMVWQNRDIYPTGTHLAKIPDTDNHFHPSPLIGRFGCKHPPPQIFIKNTPVPANPSETFQTAKVASFINQYSTGQCTVEIFWELKKETSKRWNPEIQFTSNFGNAADIQFAVSDTGSYSEPRPIGTRYLTKPL

SEQ ID NO: 545 - DNA, 4694 bp, Artificial Sequence
  Description of Artificial Sequence: Synthetic polynucleotide
tggccagtttccaagacaggctcgctcgctcactcgggccggggccccaaaggggcccctagcgaccgcttcgcggtcgcggcccgagtgagcgagcgagcctgtcttggaaactggccagcactccggtgaggtaatgccgtcacgtggtcgggaatgggaacgggaaatctcgcgagaacgtaaacaaatataagacggcgccacacggcgctgcgtcatacgcgcgcgcgcaccggcgagatgaggtcgtactacgaggtcatcgttcagctgcccaacgacgtcgagagtcaggtacctggaatctccgattcgttcgtcaactggattacgtcgcgagaatggacgttgcctgaggacgccgattgggatttggaccaggtcgatcaagttcaactgacgctcggcgacaaaatccaacgggagattcgaactcattgggggacgatggccaaagaaccggactttcactattttatccaactggaacaaggtgaggtgttctttcatttacacgtcctgctggaaacgtgttccgtaaagccgatggtactcggaagatatatccgacatattcaacaaaaaattgtgagtaaagtctactgcgccacgagcctacgatggaaggatggatgcgtggtgaccaagaccaaaaatttcgggggcgcgaacaaggtccgggccgagtcgtatattcccgcctacctgatcccgaaacagcaaccggaagtgcagtgggcgtggactaacgtgcccgagtatataaaagcgtgcttgcaccgagaactgcgtgccagtctcgcgcgacttcacttcgaggaggcgggcgtctcgcaatccaaggaaaatctcgcgagaactgcagacggcgctcccgtgatgccgacccgcgtcagcaaacgctacatggagctcgtggattggctcgtggagaaggggatcaccaccgagaaggaatggctgctggaaaacagagaaagctttcggagctttcaggcctcgagcaactcggcgcgtcagatcaagacggccctgcaaggcgccattcaggagatgcttctgaccaagacggcggaggactacctcgtcggaaaggatcccgtctcggacgacgacatccgtcagaaccgcatctacaagattctggaactgaaccactacgacccagcgtacgtggggagtattttggtcgggtggtgccagaagaaatggggcaagcgaaacacgctgtggctgttcggacatgcgaccaccggcaagaccaacatcgcggaggctattgcccatgctgtgccgttctatggatgcgttaactggaccaacgagaactttccgttcaacgactgcgtcgaaaaaatgattatctggtgggaggagggcaaaatgaccgccaaagtggtggaaacagccaaggcgattctgggaggatctcgggtgagagtggaccaaaaatgcaaagcttcggttccgatcgaaccgacgccggtcattattaccagtaacaccaacatgtgttatgtcatcgacgggaacacgaccacgttcgagcataagcagccgttggaggacaggatgtttaagctcgaattgctgactcggttgcctgatgactttggtaaggtgaccaaacaggaggtgcgtcaattcttcaggtggtctcaggatcacctgacccctgtgatcccagaattcctagtgcggaaggcggagtctcgcaaaagacccgccccttccggggaaggctatataagcccgacaaagcggcccgcgctcgcagagcagcagcaggcgtcggagagcgcggacccggttcccaccaggtatcgtatcaaatgctcgaaacattgcggtatggataaaatgttgtttccttgccaaatttgtgaatcgatgaacagagatattaatatttgtgctattcataaaacgaccgactgtaaagagtgtttccccgactacggggataaagatgatgtagaactacccccctgtacagaacacaacgtgtctcgttgttatcaatgtcattcgggcgaattgtatcgcgtgacttcggactctgacgagaaacctgcccccgagagtgatgaaggcaccgagccatcctatgctccctgcacgattcaccacctgatgggcaagagtcacgggttagtcacttgcgcggcgtgtcggttgaaaaatagtacgttgcatgatgacttggatgacggtgatctcgaacaataaatgattgaaatgtagccatgtctctcatttctgatgcgattccagattggttggagcggttggtcaaaaagggagtgaatgctgcagctgatttctaccatttggaaagcggtcctcctcgtcctaaggcaaatcagcaaactcaagaatctcttgaaaaggacgattcgagaggtctcgtgttcccaggctacaattatctaggccctttcaacggtctagataaaggagaacccgtcaacgaggcagacgctgccgccttagaacacgacaaggcttacgacctcgaaatcaaggacgggcacaacccgtactttgagtacaacgaggccgacagacgtttccaggaacgtctcaaagacgatacctcctttggaggcaatttaggtaaagccatcttccaggccaaaaagagggttctcgaaccctttggtctggtggaagactcaaagacggctccgaccggagacaagcggaaaggcgaagacgaacctcgtttgcccgacacttcttcacagactcccaagaaaaacaagaagcctcgcaaggaaagaccttccggcggggcagaagatccgggcgaaggcacctcttccaacgctggagcagcagcacccgcctctagtgtgggatcatctatcatggctgaaggaggtggcggcccagtgggcgatgcaggccagggtgccgatggagtgggcaattcctccggaaattggcattgcgattcccaatggctggaaaacggagtcgtcactcgaaccacccgaacctgggtcttgcccagctacaacaaccacctgtacaaacgaatccaaggacccagcggaggcgacaacaacaacaaattctttggattcagcaccccctggggatactttgactacaatcgattccactgccacttttccccgcgagactggcaacgactcatcaacaacaactggggcatccgtcccaaagcgatgcgctttagactctttaacatccaggttaaagaggtcacggtccaagacttcaacaccaccatcggcaacaacctcaccagtacggtccaggtctttgcggacaaggactaccaactgccgtacgtcctcggatcggctaccgaaggcaccttcccgccgttcccagcggatatctacacgatcccgcagtacgggtactgcacgctaaactacaacaacgaggcggtggatcgttcggccttctactgtctggactactttccctcagacatgctgcggacaggaaataactttgagtttacttacaccttcgaggacgttcctttccatagcatgtttgcccacaaccagacgctagaccggctgatgaatcccctcgtggatcagtacctctgggctttcagctccgtcagccaagcaggctcatctggacgagctcttcattactcgcgggcgactaaaaccaacatggcggctcaatataggaactggttacctgggcctttcttccgtgatcagcaaatctttacgggcgctagcaacatcactaaaaataacgtctttagcgtttgggaaaaaggcaagcaatgggaactcgacaatcggaccaacctaatgcagcccggtcctgcggcagcgaccacctttagcggagaacctgaccgtcaagccatgcaaaacacgctggcttttagcaggaccgtctacgatcaaacgaccgccacgaccgatcgtaaccagatactcatcaccaacgaagacgaaatcagacccaccaactcggtcggtatcgacgcgtggggagcagttcccaccaacaaccagtcgatcgtgacccccggcactcgcgcggccgtcaacaatcaaggggcgcttcccgggatggtgtggcaaaacagagacatttaccctacagggacccatttggccaaaattcccgacactgacaatcacttccatccgtccccgcttattgggcggtttggctgcaagcatccccctccccagattttcattaaaaacacacccgtccctgccaacccttcggaaacgttccagacggccaaagtggcctccttcatcaaccagtactcgaccggacagtgcaccgtcgaaatcttttgggaactcaagaaggaaacctccaagcgctggaaccccgaaatccagttcacctccaactttggcaacgcggccgacatccagtttgccgtctccgacacgggatcctattccgaacctcgtcccatcggtacccgttaccttaccaaacctctgtaaattaaacccttcaataaaccgtttatgcgtaactgtatttccgtctcctgtcgttattcagtcacatgatgcggcattacctcaccggagtgctggccagtttccaagacaggctcgctcgctcactcgggccggggccccaaaggggcccctagcgaccgcttcgcggtcgcggcccgagtgagcgagcgagcctgtcttggaaactggcca

SEQ ID NO: 546 - DNA, 2211 bp, Artificial Sequence
  Description of Artificial Sequence: Synthetic polynucleotide
atggctgctgatggttatcttccagattggctcgaggacactctctctgaaggaataagacagtggtggaagctcaaacctggcccaccaccaccaaagcccgcagagcggcataaggacgacagcaggggtcttgtgcttcctgggtacaagtacctcggacccttcaacggactcgacaagggagagccggtcaacgaggcagacgcagcggccctcgagcacgacaaggcctacgaccagcagctcaaggccggtgacaacccctacctcaagtacaaccacgccgacgcggagttccagcagcggcttcagggcgacacatcgtttgggggcaacctcggcagagcagtcttccaggccaaaaagagggttcttgaacctcttggtctggttgagcaagcgggtgagacggctcctggaaagaagagaccgttgattgaatccccccagcagcccgactcctccacgggtatcggcaaaaaaggcaagcagccggctaaaaagagactcaattttggtcagactggcgactcagagtcagtccccgacccacaacctctcggagaacctccagcaacccccgctgctgtgggacctactacaatggcttcaggtggtggcgcaccaatggcagacaataacgaaggcgccgacggagtgggtaatgcctcaggaaattggcattgcgattccacatggctgggcgacagagtcatcaccaccagcacccgcacctgggccttgcccacctacaataaccacctctacaagcaaatctccagtgcttcaacgggggccagcaacgacaaccactacttcggctacagcaccccctgggggtattttgacttcaacagattccactgccacttttcaccacgtgactggcagcgactcatcaacaacaattggggattccggcccaagagactcaacttcaaactcttcaacatccaagtcaaggaggtcacgacgaatgatggcgtcacaaccatcgctaataaccttaccagcacggttcaagtcttctcggactcagactatcagctcccgtacgtgctcgggtcggctcacgagggctgcctcccgccgttcccagcagacgtcttcatggtgccacagtatggatacctcaccctgaacaacgggagtcaggcagtaggacgctcttcattttactgcctggagtactttccttctcagatgctgcgtaccggaaacaactttaccttcagctacacttttgaggacgttcctttccacagcagctacgctcacagccagagtctggaccgtctcatgaatcctctcatcgaccagtacctgtattacctgaacagaactcagaatcagtccggaagtgcccaaaacaaggacttgctgtttagccgggggtctccagctggcatgtctgttcagcccaaaaactggctacctggaccctgttatcggcagcagcgcgtttctaaaacaaaaacagacaacaacaacagcaactttacctggactggtgcttcaaaatataaccttaatgggcgtgaatctataatcaaccctggcactgctatggcctcacacaaagacgacaaagacaagttctttcccatgagcggtgtcatgatttttggaaaggagagcgccggagcttcaaacactgcattggacaatgtcatgatcacagacgaagaggaaatcaaagccactaaccccgtggccaccgaaagatttgggactgtggcagtcaatctccagagcagcagcacagaccctgcgaccggagatgtgcatgttatgggagccttacctggaatggtgtggcaagacagagacgtatacctgcagggtcccatttgggccaaaattcctcacacagatggacactttcacccgtctcctcttatgggcggctttggactcaagaacccgcctcctcagatcctcatcaaaaacacgcctgttcctgcgaatcctccggcggagttttcagctacaaagtttgcttcattcatcacccaatactccacaggacaagtgagtgtggaaattgaatgggagctgcagaaagaaaacagcaagcgctggaatcccgaagtgcagtacacatccaattatgcaaaatctgccaacgttgattttactgtggacaacaatggactttatactgagcctcgccccattggcacccgttacctcacccgtcccctgtaa

SEQ ID NO: 547 - protein, 736 aa, Artificial Sequence
  Description of Artificial Sequence: Synthetic polypeptide
MAADGYLPDWLEDTLSEGIRQWWKLKPGPPPPKPAERHKDDSRGLVLPGYKYLGPFNGLDKGEPVNEADAAALEHDKAYDQQLKAGDNPYLKYNHADAEFQQRLQGDTSFGGNLGRAVFQAKKRVLEPLGLVEQAGETAPGKKRPLIESPQQPDSSTGIGKKGKQPAKKRLNFGQTGDSESVPDPQPLGEPPATPAAVGPTTMASGGGAPMADNNEGADGVGNASGNWHCDSTWLGDRVITTSTRTWALPTYNNHLYKQISSASTGASNDNHYFGYSTPWGYFDFNRFHCHFSPRDWQRLINNNWGFRPKRLNFKLFNIQVKEVTTNDGVTTIANNLTSTVQVFSDSDYQLPYVLGSAHEGCLPPFPADVFMVPQYGYLTLNNGSQAVGRSSFYCLEYFPSQMLRTGNNFTFSYTFEDVPFHSSYAHSQSLDRLMNPLIDQYLYYLNRTQNQSGSAQNKDLLFSRGSPAGMSVQPKNWLPGPCYRQQRVSKTKTDNNNSNFTWTGASKYNLNGRESIINPGTAMASHKDDKDKFFPMSGVMIFGKESAGASNTALDNVMITDEEEIKATNPVATERFGTVAVNLQSSSTDPATGDVHVMGALPGMVWQDRDVYLQGPIWAKIPHTDGHFHPSPLMGGFGLKNPPPQILIKNTPVPANPPAEFSATKFASFITQYSTGQVSVEIEWELQKENSKRWNPEVQYTSNYAKSANVDFTVDNNGLYTEPRPIGTRYLTRPL

SEQ ID NO: 548 - DNA, 2211 bp, Artificial Sequence
  Description of Artificial Sequence: Synthetic polynucleotide
atggcttccgatggttatcttccagattggctcgaggacaacctctctgagggcatccgcgagtggtgggacttgaaacctggagccccgaaacccaaagccaaccagcaaaagcaggacgacggccggggtctggtgcttcctggctacaagtacctcggacccttcaacggactcgacaagggggagcccgtcaacgcggcggatgcagcggccctcgagcacgacaaggcctacgaccagcagctcagagcgggtgacaatccgtacctgcggtataaccacgccgacgccgagtttcaggagcgtctgcaagaagatacgtcttttgggggcaacctcgggcgagcagtcttccaggccaagaagagggttctcgaaccttttggtctggttgaggaaggtgctaagacggctcctggaaagaaacgtccggtagagcagtcgccacaagagccagactcctcctcgggcattggcaagacaggccagcagcccgctaaaaagagactcaattttggtcagactggcgactcagagtcagtccccgacccacaacctctcggagaacctccagcaacccccgctgctgtgggacctactacaatggcttcaggcggtggcgcaccaatggcagacaataacgaaggcgccgacggagtgggtaatgcctcaggaaattggcattgcgattccacatggctgggcgacagagtcatcaccaccagcacccgaacatgggccttgcccacctataacaaccacctctacaagcaaatctccagtgcttcaacgggggccagcaacgacaaccactacttcggctacagcaccccctgggggtattttgatttcaacagattccactgccatttctcaccacgtgactggcagcgactcatcaacaacaattggggattccggcccaagagactcaacttcaaactcttcaacatccaagtcaaggaggtcacgacgaatgatggcgtcacaaccatcgctaataaccttaccagcacggttcaagtcttctcggactcggagtaccagcttccgtacgtcctcggctctgcgcaccagggctgcctccctccgttcccggcggacgtgttcatgattccgcagtacggctacctaacgctcaacaatggcagccaggcagtgggacggtcatccttttactgcctggaatatttcccatcgcagatgctgagaacgggcaataactttaccttcagctacaccttcgaggacgtgcctttccacagcagctacgcgcacagccagagcctggaccggctgatgaatcctctcatcgaccagtacctgtattacctgaacagaactcagaatcagtccggaagtgcccaaaacaaggacttgctgtttagccgggggtctccagctggcatgtctgttcagcccaaaaactggctacctggaccctgttaccggcagcagcgcgtttctaaaacaaaaacagacaacaacaacagcaactttacctggactggtgcttcaaaatataaccttaatgggcgtgaatctataatcaaccctggcactgctatggcctcacacaaagacgacaaagacaagttctttcccatgagcggtgtcatgatttttggaaaggagagcgccggagcttcaaacactgcattggacaatgtcatgatcacagacgaagaggaaatcaaagccactaaccccgtggccaccgaaagatttgggactgtggcagtcaatctccagagcagcagcacagaccctgcgaccggagatgtgcatgttatgggagccttacctggaatggtgtggcaagacagagacgtatacctgcagggtcccatttgggccaaaattcctcacacagatggacactttcacccgtctcctcttatgggcggctttggacttaagcacccgcctcctcagatcctcatcaaaaacacgcctgttcctgcgaatcctccggcagagttttcggctacaaagtttgcttcattcatcacccagtattctactggccaagtcagcgtggagattgaatgggagctgcagaaagaaaacagcaaacgctggaatcccgaagtgcagtatacatctaactatgcaaaatctgccaacgttgatttcactgtggacaacaatggactttatactgagcctcgtcccattggcacccgttacctcacccgtcccctgtaa

SEQ ID NO: 549 - protein, 736 aa, Artificial Sequence
  Description of Artificial Sequence: Synthetic polypeptide
MASDGYLPDWLEDNLSEGIREWWDLKPGAPKPKANQQKQDDGRGLVLPGYKYLGPFNGLDKGEPVNAADAAALEHDKAYDQQLRAGDNPYLRYNHADAEFQERLQEDTSFGGNLGRAVFQAKKRVLEPFGLVEEGAKTAPGKKRPVEQSPQEPDSSSGIGKTGQQPAKKRLNFGQTGDSESVPDPQPLGEPPATPAAVGPTTMASGGGAPMADNNEGADGVGNASGNWHCDSTWLGDRVITTSTRTWALPTYNNHLYKQISSASTGASNDNHYFGYSTPWGYFDFNRFHCHFSPRDWQRLINNNWGFRPKRLNFKLFNIQVKEVTTNDGVTTIANNLTSTVQVFSDSEYQLPYVLGSAHQGCLPPFPADVFMIPQYGYLTLNNGSQAVGRSSFYCLEYFPSQMLRTGNNFTFSYTFEDVPFHSSYAHSQSLDRLMNPLIDQYLYYLNRTQNQSGSAQNKDLLFSRGSPAGMSVQPKNWLPGPCYRQQRVSKTKTDNNNSNFTWTGASKYNLNGRESIINPGTAMASHKDDKDKFFPMSGVMIFGKESAGASNTALDNVMITDEEEIKATNPVATERFGTVAVNLQSSSTDPATGDVHVMGALPGMVWQDRDVYLQGPIWAKIPHTDGHFHPSPLMGGFGLKHPPPQILIKNTPVPANPPAEFSATKFASFITQYSTGQVSVEIEWELQKENSKRWNPEVQYTSNYAKSANVDFTVDNNGLYTEPRPIGTRYLTRPL

SEQ ID NO: 550 - DNA, 2211 bp, Artificial Sequence
  Description of Artificial Sequence: Synthetic polynucleotide
atggctgctgatggttatcttccagattggctcgaggacactctctctgaaggaataagacagtggtggaagctcaaacctggcccaccaccaccaaagcccgcagagcggcataaggacgacagcaggggtcttgtgcttcctgggtacaagtacctcggacccttcaacggactcgacaagggagagccggtcaacgaggcagacgcagcggccctcgagcacgacaaggcctacgaccagcagctcaaggccggtgacaacccctacctcaagtacaaccacgccgacgcggagttccagcagcggcttcagggcgacacatcgtttgggggcaacctcggcagagcagtcttccaggccaaaaagagggttcttgaacctcttggtctggttgagcaagcgggtgagacggctcctggaaagaagagaccgttgattgaatccccccagcagcccgactcctccacgggtatcggcaaaaaaggcaagcagccggctaaaaagagactcaattttggtcagactggcgactcagagtcagtccccgacccacaacctctcggagaacctccagcaacccccgctgctgtgggacctactacaatggcttcaggtggtggcgcaccaatggcagacaataacgaaggcgccgacggagtgggtaatgcctcaggaaattggcattgcgattccacatggctgggcgacagagtcatcaccaccagcacccgcacctgggccttgcccacctacaataaccacctctacaagcaaatctccagtgcttcaacgggggccagcaacgacaaccactacttcggctacagcaccccctgggggtattttgacttcaacagattccactgccacttttcaccacgtgactggcagcgactcatcaacaacaattggggattccggcccaagagactcaacttcaaactcttcaacatccaagtcaaggaggtcacgacgaatgatggcgtcacaaccatcgctaataaccttaccagcacggttcaagtcttctcggactcagactatcagctcccgtacgtgctcgggtcggctcacgagggctgcctcccgccgttcccagcagacgtcttcatggtgccacagtatggatacctcaccctgaacaacgggagtcaggcagtaggacgctcttcattttactgcctggagtactttccttctcagatgctgcgtaccggaaacaactttaccttcagctacacttttgaggacgttcctttccacagcagctacgctcacagccagagtctggaccgtctcatgaatcctctcatcgaccagtacctgtattacctgaacagaactcagaatcagtccggaagtgcccaaaacaaggacttgctgtttagccgggggtctccaactggcatgtctgttcagcccaaaaactggctacctggaccctgttatcggcagcagcgcgtttctaaaacaaaaacagacaacaacaacagcaactttacctggactggtgcttcaaaatataaccttaatgggcgtgaatctataatcaaccctggcactgctatggcctcacacaaagacgacaaagacaagttctttcccatgagcggtgtcatgatttttggaaaggagagcgccggagcttcaaacactgcattggacaatgtcatgatcacagacgaagaggaaatcaaagccactaaccccgtggccactgaaagatttgggactgtggcagtcaatctccagagcagcagcacagaccctgcgaccggagatgtgcatgccatgggagccttacctggaatggtgtggcaagacagagacgtatacctgcagggtcctatttgggccaaaattcctcacacggatggacactttcacccgtctcctctcatgggcggctttggactcaagaacccgcctcctcagatcctcatcaaaaacacgcctgttcctgcgaatcctccggcggagttttcagctacaaagtttgcttcattcatcacccagtattccacaggacaagtgagcgtggagattgaatgggagctgcagaaagaaaacagcaaacgctggaatcccgaagtgcagtatacatctaactatgcaaaatctgccaacgttgatttcactgtggacaacaatggactttatactgagcctcgccccattggcacccgttacctcacccgtcccctgtaa

SEQ ID NO: 551 - protein, 736 aa, Artificial Sequence
  Description of Artificial Sequence: Synthetic polypeptide
MAADGYLPDWLEDTLSEGIRQWWKLKPGPPPPKPAERHKDDSRGLVLPGYKYLGPFNGLDKGEPVNEADAAALEHDKAYDQQLKAGDNPYLKYNHADAEFQQRLQGDTSFGGNLGRAVFQAKKRVLEPLGLVEQAGETAPGKKRPLIESPQQPDSSTGIGKKGKQPAKKRLNFGQTGDSESVPDPQPLGEPPATPAAVGPTTMASGGGAPMADNNEGADGVGNASGNWHCDSTWLGDRVITTSTRTWALPTYNNHLYKQISSASTGASNDNHYFGYSTPWGYFDFNRFHCHFSPRDWQRLINNNWGFRPKRLNFKLFNIQVKEVTTNDGVTTIANNLTSTVQVFSDSDYQLPYVLGSAHEGCLPPFPADVFMVPQYGYLTLNNGSQAVGRSSFYCLEYFPSQMLRTGNNFTFSYTFEDVPFHSSYAHSQSLDRLMNPLIDQYLYYLNRTQNQSGSAQNKDLLFSRGSPTGMSVQPKNWLPGPCYRQQRVSKTKTDNNNSNFTWTGASKYNLNGRESIINPGTAMASHKDDKDKFFPMSGVMIFGKESAGASNTALDNVMITDEEEIKATNPVATERFGTVAVNLQSSSTDPATGDVHAMGALPGMVWQDRDVYLQGPIWAKIPHTDGHFHPSPLMGGFGLKNPPPQILIKNTPVPANPPAEFSATKFASFITQYSTGQVSVEIEWELQKENSKRWNPEVQYTSNYAKSANVDFTVDNNGLYTEPRPIGTRYLTRPL

SEQ ID NO: 552 - DNA, 2211 bp, Artificial Sequence
  Description of Artificial Sequence: Synthetic polynucleotide
atggctgccgatggttatcttccagattggctcgaggacaacctctctgagggcattcgcgagtggtgggcgctgaaacctggagccccgaagcccaaagccaaccagcaaaagcaggacgacggccggggtctggtgcttcctggctacaagtacctcggacccttcaacggactcgacaagggggagcccgtcaacgcggcggatgcagcggccctcgagcacgacaaggcctacgaccagcagctcaaagcgggtgacaatccgtacctgcggtataaccacgccgacgccgagtttcaggagcgtctgcaagaagatacgtcttttgggggcaacctcgggcgagcagtcttccaggccaagaagcgggttctcgaacctctcggtctggttgaggaaggcgctaagacggctcctggaaagaaacgtccggtagagcaatcgccacaagagccagactcctcctcgggcatcggcaagacaggccagcagcccgctaaaaagagactcaattttggtcagactggcgactcagagtcagtccccgacccacaacctctcggagaacctccagcaacccccgctgctgtgggacctactacaatggcttcaggcggtggcgcaccaatggcagacaataacgaaggcgccgacggagtgggtaatgcctcaggaaattggcattgcgattccacatggctgggcgacagagtcatcaccaccagcacccgaacatgggccttgcccacctataacaaccacctctacaagcaaatctccagtgcttcgacgggggccagcaacgacaaccactacttcggctacagcaccccctgggggtattttgactttaacagattccactgccacttttcaccacgtgactggcagcgactcatcaacaacaactggggattccggcccaagagactcagcttcaagctcttcaacatccaggtcaaggaggtcacgacgaatgatggcgtcacaaccatcgctaataaccttaccagcacggttcaagtcttctcggactcggagtaccagcttccgtacgtcctcggctctgcgcaccagggctgcctccctccgttcccggcggacgtgttcatgattccgcaatacggctacctgacgctcaacaatggcagccaagccgtgggacgttcatccttttactgcctggaatatttcccttctcagatgctgagaacgggcaacaactttaccttcagctacacctttgaggaagtgcctttccacagcagctacgcgcacagccagagcctggaccggctgatgaatcctctcatcgatcaatacctgtattacctgaacagaactcaaaatcagtccggaagtgcccaaaacaaggacttgctgtttagccgtgggtctccagctggcatgtctgttcagcccaaaaactggctacctggaccctgttatcggcagcagcgcgtttctaaaacaaaaacagacaacaacaacagcaattttacctggactggtgcttcaaaatataacctcaatgggcgtgaatccatcatcaaccctggcactgctatggcctcacataaagacgacgaagacaagttctttcccatgagcggtgtcatgatttttggaaaagagagcgccggagcttcaaacactgcattggacaatgtcatgattacagacgaagaggaaattaaagccactaaccctgtggccaccgaaagatttgggaccgtggcagtcaatttccagagcagcagcacagaccctgcgaccggagatgtgcatgctatgggagcattacctggcatggtgtggcaagatagagacgtgtacctgcagggtcccatttgggccaaaattcctcacacagatggacactttcacccgtctcctcttatgggcggctttggactcaagaacccgcctcctcagatcctcatcaaaaacacgcctgttcctgcgaatcctccggcggagttttcagctacaaagtttgcttcattcatcacccaatactccacaggacaagtgagcgtggagattgaatgggagctgcagaaagaaaacagcaaacgctggaatcccgaagtgcagtatacatctaactatgcaaaatctgccaacattgatttcactgtggacaacaatggactttatactgagcctcgccccattggcacccgttacctcacccgtccccagtaa

SEQ ID NO: 553 - protein, 736 aa, Artificial Sequence
  Description of Artificial Sequence: Synthetic polypeptide
MAADGYLPDWLEDNLSEGIREWWALKPGAPKPKANQQKQDDGRGLVLPGYKYLGPFNGLDKGEPVNAADAAALEHDKAYDQQLKAGDNPYLRYNHADAEFQERLQEDTSFGGNLGRAVFQAKKRVLEPLGLVEEGAKTAPGKKRPVEQSPQEPDSSSGIGKTGQQPAKKRLNFGQTGDSESVPDPQPLGEPPATPAAVGPTTMASGGGAPMADNNEGADGVGNASGNWHCDSTWLGDRVITTSTRTWALPTYNNHLYKQISSASTGASNDNHYFGYSTPWGYFDFNRFHCHFSPRDWQRLINNNWGFRPKRLSFKLFNIQVKEVTTNDGVTTIANNLTSTVQVFSDSEYQLPYVLGSAHQGCLPPFPADVFMIPQYGYLTLNNGSQAVGRSSFYCLEYFPSQMLRTGNNFTFSYTFEEVPFHSSYAHSQSLDRLMNPLIDQYLYYLNRTQNQSGSAQNKDLLFSRGSPAGMSVQPKNWLPGPCYRQQRVSKTKTDNNNSNFTWTGASKYNLNGRESIINPGTAMASHKDDEDKFFPMSGVMIFGKESAGASNTALDNVMITDEEEIKATNPVATERFGTVAVNFQSSSTDPATGDVHAMGALPGMVWQDRDVYLQGPIWAKIPHTDGHFHPSPLMGGFGLKNPPPQILIKNTPVPANPPAEFSATKFASFITQYSTGQVSVEIEWELQKENSKRWNPEVQYTSNYAKSANIDFTVDNNGLYTEPRPIGTRYLTRPQ

SEQ ID NO: 554 - DNA, 2211 bp, Artificial Sequence
  Description of Artificial Sequence: Synthetic polynucleotide
atggctgccgatggttatcttccagattggctcgaggacaacctctctgagggcattcgcgagtggtgggacttgaaacctggagccccgaaacccaaagccaaccagcaaaagcaggacgacggccggggtctggtgcttcctggctacaagtacctcggacccttcaacggactcgacaagggggagcccgtcaacgcggcggatgcagcggccctcgagcacgacaaggcctacgaccagcagctcaaagcgggtgacaatccgtaccttcggtataaccacgccgacgccgagtttcaggagcgtctgcaagaagatacgtcttttgggggcaacctcgggcgagcagtcttccaggccaaaaagagggttctcgaacctctcggtctggttgaggaagcggctaagacggctcctggaaagaaacgtccggtagagcagtcgccacaagagccagactcctcctcgggcattggcaagacaggccagcagcccgctaaaaagagactcaattttggtcagactggcgactcagagtcagtccccgacccacaacctctcggagaacctcccgcagccccctcaggtgtgggatctcttacaatggcttcaggtggtggcgcaccaatggcagacaataacgaaggcgccgacggagtgggtaatgcctcaggaaattggcattgcgattccacatggctgggcgacagagtcatcaccaccagcacccgcacctgggccttgcccacctacaataaccacctctacaagcaaatctccagtgcttcaacgggggccagcaacgacaaccactacttcggctacagcaccccctgggggtattttgacttcaacagattccactgccacttttcaccacgtgactggcaaagactcatcaacaacaattggggattccggcccaagagactcaacttcaagctcttcaacatccaagtcaaggaggtcacgacgaatgatggcgtcacgaccatcgctaataaccttaccagcacggttcaagtcttctcggactcggagtaccagttgccgtacgtcctcggctctgcgcaccagggctgcctccctccgttcccggcggacgtgttcatgattccgcagtacggctacctaacgctcaacaatggcagccaggcagtgggacggtcatccttttactgcctggaatatttcccatcgcagatgctgagaacgggcaacaactttaccttcagctacacctttgaggaagtgcctttccacagcagctacgcgcacagccagagcctggaccggctgatgaatcctctcatcgaccagtacctgtattacctgaacagaactcaaaatcagtccggaagtgcccaaaacaaggacttgctgtttagccgtgggtctccagctggcatgtctgttcagcccaaaaactggctacctggaccctgttaccggcagcagtgcgtttctaaaacaaaaacagacaacaacaacagcaactttacctggactggtgcttcaaaatataaccttaatgggcgtgaatctataatcaaccctggcactgctatggcctcacacaaagacgacaaagacaagttctttcccatgagcggtgtcatgatttttggaaaggagagcgccggagcttcaaacactgcattggacaatgtcatgatcacagacgaagaggaaatcaaagccactaaccccgtggccaccgaaagatttgggactgtggcagtcaatctccagagcagcagcacagaccctgcgaccggagatgtgcatgttatgggagccttacctggaatggtgtggcaagacagagacgtatacctgcagggtcctatttgggccaaaattcctcacacagatggacactttcacccgtctcctcttatgggcggctttggactcaagaacccgcctcctcagatcctcatcaaaaacacgcctgttcctgcgaatcctccggcggagttttcagctacaaagtttgcttcattcatcacccaatactccacaggacaagtgagcgtggagattgaatgggagctgcagaaagaaaacagcaagcgctggaatcccgaagtgcagtacacatccaattatgcaaaatctgccaacgttgatttcactgtggacaacaatggactttatactgagcctcgccccattggcacccgttacctcacccgtcccctgtaa

SEQ ID NO: 555 - protein, 736 aa, Artificial Sequence
  Description of Artificial Sequence: Synthetic polypeptide
MAADGYLPDWLEDNLSEGIREWWDLKPGAPKPKANQQKQDDGRGLVLPGYKYLGPFNGLDKGEPVNAADAAALEHDKAYDQQLKAGDNPYLRYNHADAEFQERLQEDTSFGGNLGRAVFQAKKRVLEPLGLVEEAAKTAPGKKRPVEQSPQEPDSSSGIGKTGQQPAKKRLNFGQTGDSESVPDPQPLGEPPAAPSGVGSLTMASGGGAPMADNNEGADGVGNASGNWHCDSTWLGDRVITTSTRTWALPTYNNHLYKQISSASTGASNDNHYFGYSTPWGYFDFNRFHCHFSPRDWQRLINNNWGFRPKRLNFKLFNIQVKEVTTNDGVTTIANNLTSTVQVFSDSEYQLPYVLGSAHQGCLPPFPADVFMIPQYGYLTLNNGSQAVGRSSFYCLEYFPSQMLRTGNNFTFSYTFEEVPFHSSYAHSQSLDRLMNPLIDQYLYYLNRTQNQSGSAQNKDLLFSRGSPAGMSVQPKNWLPGPCYRQQCVSKTKTDNNNSNFTWTGASKYNLNGRESIINPGTAMASHKDDKDKFFPMSGVMIFGKESAGASNTALDNVMITDEEEIKATNPVATERFGTVAVNLQSSSTDPATGDVHVMGALPGMVWQDRDVYLQGPIWAKIPHTDGHFHPSPLMGGFGLKNPPPQILIKNTPVPANPPAEFSATKFASFITQYSTGQVSVEIEWELQKENSKRWNPEVQYTSNYAKSANVDFTVDNNGLYTEPRPIGTRYLTRPL

SEQ ID NO: 556 - DNA, 2211 bp, Artificial Sequence
  Description of Artificial Sequence: Synthetic polynucleotide
atggctgccgatggttatcttccagattggctcgaggacaacctctctgagggcattcgcgaatggtgggacttgaaacctggagccccgaaacccaaagtcaaccagcaaaagcaggacaacgctcggggtcttgtgcttccgggttacaaatacctcggacccttcaacggactcgacaagggggagcccgtcaacgcggcggacgcagcggccctcgagcacgacaaggcctacgaccagcagctcaaagcgggtgacaatccgtaccttcggtataaccacgccgacgccgagtttcaggagcgtctgcaagaagatacgtcttttgggggcaaccttggacgagcagtcttccaggccaagaagagggttctcgaaccttttggtctggttgaggaaggtgctaagacggctcctggaaagaaacgtccggtagagcagtcgccacaagagccagactcctcctcgggcattggcaagacaggccagcagcccgctaaaaagagactcaattttggtcagactggcgactcagagtcagtccccgacccacaacctctcggagaacctccagcaacccccgctgctgtgggacctactacaatggcttcaggcggtggcgcaccaatggcagacaataacgaaggcgccgacggagtgggtaatgcctcaggaaattggcattgcgattccacatggctgggcgacagagtcatcaccaccagcacccgcacctgggccttgcccacctacaataaccacctctacaagcaaatctccagtgcttcaacgggggccagcaacgacaaccactacttcggctacagcaccccctgggggtattttgacttcaacagattccactgccacttttcaccacgtgactggcaaagactcatcaacaacaattggggattccggcccaagagactcaacttcaagctcttcaacatccaagtcaaggaggtcacgacgaatgatggcgtcacgaccatcgctaataaccttaccagcacggttcaagtcttctcggactcggagtaccagttgccgtacgtcctcggctctgcgcaccagggctgcctccctccgttcccggcggacgtgttcatgattccgcaatacggctacctgacgctcaacaatggcagccaggcagtgggacggtcatccttttactgcctggaatatttcccatcgcagatgctgagaacgggcaataactttaccttcagctacacttttgaggacgttcctttccacagcagctacgctcacagccagagcctggaccggctgatgaatcctctcatcgaccagtacctgtattacctgaacagaactcagaatcagtccggaagtgcccaaaacaaggacttgctgtttagccgtgggtctccaactggcatgtctgttcagcccaaaaactggctacctggaccctgttatcggcagcagcgcgtttctaaaacaaaaacagacaacaacaacagcaactttacctggactggtgcttcaaaatataaccttaatgggcgtgaatctataatcaaccctggcactgctatggcctcacacaaagacgacgaagacaagttctttcccatgagcggtgtcatgatttttggaaaggagagcgccggagcttcaaacactgcattggacaatgtcatgatcacagacgaagaggaaatcaaagccactaaccccgtggccactgaaagatttgggactgtggcagtcaatctccagagcagcagcacagaccctgcgaccggagatgtgcatgccatgggagccttacctggaatggtgtggcaagacagagacgtatacctgcagggtcctatttgggccaaaattcctcacacggatggacactttcacccgtctcctctcatgggcggctttggacttaagcacccgcctcctcagatcctcatcaaaaacacgcctgttcctgcgaatcctccggcagagttttcggctacaaagtttgcttcattcatcacccagtattccacaggacaagtgagcgtggagattgaatgggagctgcagaaagaaaacagcaaacgctggaatcccgaagtgcagtatacatctaactatgcaaaatctgccaacgttgatttcactgtggacaacaatggactttatactgagcctcgccccattggcacccgttacctcacccgtcccctgtaa

SEQ ID NO: 557 - protein, 736 aa, Artificial Sequence
  Description of Artificial Sequence: Synthetic polypeptide
MAADGYLPDWLEDNLSEGIREWWDLKPGAPKPKVNQQKQDNARGLVLPGYKYLGPFNGLDKGEPVNAADAAALEHDKAYDQQLKAGDNPYLRYNHADAEFQERLQEDTSFGGNLGRAVFQAKKRVLEPFGLVEEGAKTAPGKKRPVEQSPQEPDSSSGIGKTGQQPAKKRLNFGQTGDSESVPDPQPLGEPPATPAAVGPTTMASGGGAPMADNNEGADGVGNASGNWHCDSTWLGDRVITTSTRTWALPTYNNHLYKQISSASTGASNDNHYFGYSTPWGYFDFNRFHCHFSPRDWQRLINNNWGFRPKRLNFKLFNIQVKEVTTNDGVTTIANNLTSTVQVFSDSEYQLPYVLGSAHQGCLPPFPADVFMIPQYGYLTLNNGSQAVGRSSFYCLEYFPSQMLRTGNNFTFSYTFEDVPFHSSYAHSQSLDRLMNPLIDQYLYYLNRTQNQSGSAQNKDLLFSRGSPTGMSVQPKNWLPGPCYRQQRVSKTKTDNNNSNFTWTGASKYNLNGRESIINPGTAMASHKDDEDKFFPMSGVMIFGKESAGASNTALDNVMITDEEEIKATNPVATERFGTVAVNLQSSSTDPATGDVHAMGALPGMVWQDRDVYLQGPIWAKIPHTDGHFHPSPLMGGFGLKHPPPQILIKNTPVPANPPAEFSATKFASFITQYSTGQVSVEIEWELQKENSKRWNPEVQYTSNYAKSANVDFTVDNNGLYTEPRPIGTRYLTRPL

SEQ ID NO: 558 - DNA, 2208 bp, Artificial Sequence
  Description of Artificial Sequence: Synthetic polynucleotide
  misc_feature (955)..(955): n is a, c, t, or g
  misc_feature (971)..(972): n is a, c, t, or g
  misc_feature (981)..(981): n is a, c, t, or g
  misc_feature (986)..(986): n is a, c, t, or g
  misc_feature (1235)..(1235): n is a, c, t, or g
  misc_feature (1694)..(1696): n is a, c, t, or g
  misc_feature (1698)..(1698): n is a, c, t, or g
  misc_feature (1763)..(1765): n is a, c, t, or g
  misc_feature (1778)..(1778): n is a, c, t, or g
  misc_feature (2204)..(2204): n is a, c, t, or g
atggctgccgatggttatcttccagattggctcgaggacaacctctctgagggcattcgcgaatggtgggacttgaaacctggagccccgaaacccaaagtcaaccagcaaaagcaggacaacgctcggggtcttgtgcttccgggttacaaatacctcggacccttcaacggactcgacaagggggagcccgtcaacgcggcggacgcagcggccctcgagcacgacaaggcctacgaccagcagctcaaagcgggtgacaatccgtaccttcggtataaccacgccgacgccgagtttcaggagcgtctgcaagaagatacgtcttttgggggcaaccttggacgagcagtcttccaggccaagaagagggttctcgaaccttttggtctggttgaggaaggtgctaagacggctcctggaaagaaacgtccggtagagcagtcgccacaagagccagactcctcctcgggcattggcaagacaggccagcagcccgctaaaaagagactcaattttggtcagactggcgactcagagtcagtccccgacccacaacctctcggagaacctccagcaacccccgctgctgtgggacctactacaatggcttcaggcggtggcgcaccaatggcagacaataacgaaggcgccgacggagtgggtaatgcctcaggaaattggcattgcgattccacatggctgggcgacagagtcatcaccaccagcacccgaacatgggccttgcccacctataacaaccacctctacaagcaaatctccagtgcttcaacgggggccagcaacgacaaccactacttcggctacagcaccccctgggggtattttgatttcaacagattccactgccacttttcaccacgtgactggcagcgactcatcaataacaattggggattccggcccaagagactcaacttcaaactcttcaacntccaagtcaaggaggnnacgacgaangatgncgtcacaaccatcgctaataaccttaccagcacggttcaagtcttctcggactcggagtaccagcttccgtacgtcctcggctctgcgcaccagggctgcctccctccgttcccggcggacgtgttcatgattccgcaatacggctacctgacgctcaacaatggcagccaggcagtgggacggtcatccttttactgcctggaatatttcccatcgcagatgctgagaacgggcaataactttacctncagctacacttttgaggacgttcctttccacagcagctacgctcacagccagagcctggaccggctgatgaatcctctcatcgaccagtacctgtattacctgaacagaactcagaatcagtccggaagtgcccaaaacaaggacttgctgtttagccgtgggtctccaactggcatgtctgttcagcccaaaaactggctacctggaccctgttatcggcagcagcgcgtttctaaaacaaaaacagacaacaacaacagcaactttacctggactggtgcttcaaaatataaccttaatgggcgtgaatctataatcaaccctggcactgctatggcctcacacaaagacgacgaagacaagttctttcccatgagcggtgtcatgatttttggaaaggagagcgccggagcttcaaacactgcattggacaatgtcatgatcacagacgaagagannncnaagccactaaccccgtggccactgaaagatttgggactgtggcagtcaatctccaagcagcacannnaccctgcgaccgnagatgtgcatgccatgggagccttacctggaatggtgtggcaagacagagacgtatacctgcagggtcctatttgggccaaaattcctcacacggatggacactttcacccgtctcctctcatgggcggctttggacttaagcacccgcctcctcagatcctcatcaaaaacacgcctgttcctgcgaatcctccggcagagttttcggctacaaagtttgcttcattcatcacccagtattccacaggacaagtgagcgtggagattgaatgggagctgcagaaagaaaacagcaaacgctggaatcccgaagtgcagtatacatctaactatgcaaaatctgccaacgttgatttcactgtggacaacaatggactttatactgagcctcgccccattggcacccgttacctcacccgtccccngtaa

SEQ ID NO: 559 - protein, 723 aa, Artificial Sequence
  Description of Artificial Sequence: Synthetic polypeptide
MAADGYLPDWLEDNLSEGIREWWDLKPGAPKPKVNQQKQDNARGLVLPGYKYLGPFNGLDKGEPVNAADAAALEHDKAYDQQLKAGDNPYLRYNHADAEFQERLQEDTSFGGNLGRAVFQAKKRVLEPFGLVEEGAKTAPGKKRPVEQSPQEPDSSSGIGKTGQQPAKKRLNFGQTGDSESVPDPQPLGEPPATPAAVGPTTMASGGGAPMADNNEGADGVGNASGNWHCDSTWLGDRVITTSTRTWALPTYNNHLYKQISSASTGASNDNHYFGYSTPWGYFDFNRFHCHFSPRDWQRLINNNWGFRPKRLNFKLFNQVKETTDVTTIANNLTSTVQVFSDSEYQLPYVLGSAHQGCLPPFPADVFMIPQYGYLTLNNGSQAVGRSSFYCLEYFPSQMLRTGNNFTSYTFEDVPFHSSYAHSQSLDRLMNPLIDQYLYYLNRTQNQSGSAQNKDLLFSRGSPTGMSVQPKNWLPGPCYRQQRVSKTKTDNNNSNFTWTGASKYNLNGRESIINPGTAMASHKDDEDKFFPMSGVMIFGKESAGASNTALDNVMITDEEATNPVATERFGTVAVNLQSSPATDVHAMGALPGMVWQDRDVYLQGPIWAKIPHTDGHFHPSPLMGGFGLKHPPPQILIKNTPVPANPPAEFSATKFASFITQYSTGQVSVEIEWELQKENSKRWNPEVQYTSNYAKSANVDFTVDNNGLYTEPRPIGTRYLTRP

SEQ ID NO: 560 - DNA, 2208 bp, Artificial Sequence
  Description of Artificial Sequence: Synthetic polynucleotide
atggctgccgatggttatcttccagattggctcgaggacactctctctgaaggaataagacagtggtggaagctcaaacctggcccaccaccaccaaagcccgcagagcggcataaggacgacagcaggggtcttgtgcttcctgggtacaagtacctcggacccttcaacggactcgacaagggagagccggtcaacgaggcagacgccgcggccctcgagcacgacaaagcctatgaccggcagctcgacagcggagacaacccgtacctcaagtacaaccacgccgacgcggagtttcaggagcgccttaaagaagatacgtcttttgggggcaacctcggacgagcagtcttccaggcgaaaaagagggttcttgaacctctgggcctggttgaggaacctgttaagacggctccgggaaaaaagaggccggtagagcactctcctgtggagccagactcctcctcgggaaccggaaaggcgggtcagcagcctgcaagaaaaagattgaattttggtcagactggagacgcagactcagtacctgacccccagcctctcggacagccaccagcagccccctctggtctgggaactaatacgatggctacaggcagtggcgcaccaatggcagacaataacgagggcgccgacggagtgggtaattcctcgggaaattggcattgcgattccacatggatgggcgacagagtcatcaccaccagcacccgaacctgggccctgcccacctacaacaaccacctctacaaacaaatttccagccaatcaggagcctcgaacgacaatcactactttggctacagcaccccttgggggtattttgacttcaacagattccactgccacttttcaccacgtgactggcaaagactcatcaacaacaactggggattccgacccaagagactcaagttcaagctctttaacattcaagtcaaagaggtcacgcagaatgacggtacgacgacgattgccaataaccttaccagcacggttcaggtgtttactgactcggagtaccagctcccgtacgtcctcggctcggcgcatcaaggatgcctcccgccgttcccagcagacgtcttcatggtgccacagtatggatacctcaccctgaacaacgggagtcaggcagtaggacgctcttcattttactgcctggagtactttccttctcagatgctgcgtaccggtaacaactttaccttcagctacacttttgaggacgttcctttccacagcagctacgctcacagccagagtctggaccgtctcatgaatcctctcatcgaccagtacctgtattacttgagcagaacagacgctccaagtggaaccaccacgcagtcaaggcttcagttttctcaggccggagcgagtgacattcgggaccagtctaggaactggcttcctggaccctgttaccgccagcagcgagtatcaaagacatctgcggataacaacaacagtgaatactcgtggactggagctaccaagtaccacctcaatggcagagactctctggtgaatccgggcccggccatggcaagccacaaggacgatgaagaaaagttttttcctcagagcggggttctcatctttgggaagcaaggctcagagaaaacaagtgtggacattgaaaaggtcatgattacagacgaagaggaaatcaggacaaccaatcccgtggctacggagcagtatggttctgtatctaccaacctccagagaggcaacagacaagcagctaccgcagatgtcaacacacaaggcgttcttccaggcatggtctggcaggacagagatgtgtaccttcaggggcccatctgggcaaagattccacacacggacggacattttcacccctctcccctcatgggtggattcggacttaaacaccctcctccacagattctcatcaagaacaccccggtacctgcgaatccttcgaccaccttcagtgcggcaaagtttgcttccttcatcacacagtactccacgggacaggtcagcgtggagatcgagtgggagctgcagaaggaaaacagcaaacgctggaatcccgaagttcagtacacttccaactacaacaagtctgttaatgtggactttactgtggacactaatggcgtgtattcagagcctcgccccattggcaccagatacctgactcgtaatctgtaa

SEQ ID NO: 561 - protein, 735 aa, Artificial Sequence
  Description of Artificial Sequence: Synthetic polypeptide
MAADGYLPDWLEDTLSEGIRQWWKLKPGPPPPKPAERHKDDSRGLVLPGYKYLGPFNGLDKGEPVNEADAAALEHDKAYDRQLDSGDNPYLKYNHADAEFQERLKEDTSFGGNLGRAVFQAKKRVLEPLGLVEEPVKTAPGKKRPVEHSPVEPDSSSGTGKAGQQPARKRLNFGQTGDADSVPDPQPLGQPPAAPSGLGTNTMATGSGAPMADNNEGADGVGNSSGNWHCDSTWMGDRVITTSTRTWALPTYNNHLYKQISSQSGASNDNHYFGYSTPWGYFDFNRFHCHFSPRDWQRLINNNWGFRPKRLKFKLFNIQVKEVTQNDGTTTIANNLTSTVQVFTDSEYQLPYVLGSAHQGCLPPFPADVFMVPQYGYLTLNNGSQAVGRSSFYCLEYFPSQMLRTGNNFTFSYTFEDVPFHSSYAHSQSLDRLMNPLIDQYLYYLSRTDAPSGTTTQSRLQFSQAGASDIRDQSRNWLPGPCYRQQRVSKTSADNNNSEYSWTGATKYHLNGRDSLVNPGPAMASHKDDEEKFFPQSGVLIFGKQGSEKTSVDIEKVMITDEEEIRTTNPVATEQYGSVSTNLQRGNRQAATADVNTQGVLPGMVWQDRDVYLQGPIWAKIPHTDGHFHPSPLMGGFGLKHPPPQILIKNTPVPANPSTTFSAAKFASFITQYSTGQVSVEIEWELQKENSKRWNPEVQYTSNYNKSVNVDFTVDTNGVYSEPRPIGTRYLTRNL

SEQ ID NO: 562 - DNA, 2208 bp, Artificial Sequence
  Description of Artificial Sequence: Synthetic polynucleotide
atggctgccgatggttatcttccagattggctcgaggacactctctctgaaggaataagacagtggtggaagctcaaacctggcccaccaccaccaaagcccgcagagcggcataaggacgacagcaggggtcttgtgcttcctgggtacaagtacctcggacccttcaacggactcgacaagggagagccggtcaacgaggcagacgccgcggccctcgagcacgacaaagcctatgaccggcagctcgacagcggagacaacccgtacctcaagtacaaccacgccgacgcggagtttcaggagcgccttaaagaagatacgtcttttgggggcaacctcggacgagcagtcttccaggcgaaaaagagggttcttgaacctctgggcctggttgaggaacctgttaagacggctccgggaaaaaagaggccggtagagcactctcctgtggagccagactcctcctcgggaaccggaaaggcgggccagcagcctgcaagaaaaagattgaattttggtcagactggagacgcaaactcagtacctgacccccagcctctcggacagccaccagcagccccctctggtctgggaactaatacgatggctacaggcagtggcgcaccaatggcagacaataacgagggcgccgacggagtgggtaattcctcgggaaattggcattgcgattccacatggatgggcgacagagtcatcaccaccagcacccgaacctgggccctgcccacctacaacaaccacctctacaaacaaatttccagccaatcaggagcctcgaacgacaatcactactttggctacagcaccccttgggggtattttgacttcaacagattccactgccacttttcaccacgtgactggcaaagactcatcaacaacaactggggattccgacccaagagactcaagttcaagctctttaacattcaagtcaaagaggtcacgcagaatgacggtacgacgacgattgccaataaccttaccagcacggttcaggtgtttactgactcggagtaccagctcccgtacgtcctcggctcggcgcatcaaggatgcctcccgccgttcccagcagacgtcttcatggtgccacagtatggatacctcaccctgaacaacgggagtcgggcagtaggacgctcttcattttactgcctggagtactttccttctcagatgctgcgtaccggtaacaactttaccttcagctacacttttgaggacgttcctttccacagcagctacgctcacagccagagtctggaccgtctcatgaatcctctcatcgaccagtacctgtattacttgagcagaacagacactccaagtggaaccaccacgcagtcaaggcttcagttttctcaggccggagcgagtgacattcgggaccagtctaggaactggcttcctggaccctgttaccgccagcagcgagtatcaaagacatctgcggataacaacaacagtgaatactcgtggactggagctaccaagtaccacctcaatggcagagactctctggtgaatccgggcccggccatggcaagccacaaggacgatgaagaaaagttttttcctcagagcggggttctcatctttgggaagcaaggctcagagaaaacaagtgtggacattgaaaaggtcatgattacagacgaagaggaaatcaggacgaccaatcccgtggctacggagcagtatggttctgtatctaccaacctccagagaggcaacagacaagcagctaccgcagatgtcaacacacaaggcgttcttccaggcatggtctggcaggacagagatgtgtaccttcaggggcccatctgggcaaagattccacacacggacggacattttcacccctctcccctcatgggtggattcggacttaaacaccctcctccacagattctcatcaagaacaccccggtacctgcgaatccttcgaccaccttcagtgcggcaaagtttgcttccttcatcacacagtactccacgggacaggtcagcgtggagatcgagtgggagctgcagaaggaaaacagcaaacgctggaatcccgaagttcagtacacttccaactacaacaagtctgttaatgtggactttactgtggacactaatggcgtgtatacagagcctcgccccattggcaccagatacctgactcgtaatctgtaa

SEQ ID NO: 563 - protein, 735 aa, Artificial Sequence
  Description of Artificial Sequence: Synthetic polypeptide
MAADGYLPDWLEDTLSEGIRQWWKLKPGPPPPKPAERHKDDSRGLVLPGYKYLGPFNGLDKGEPVNEADAAALEHDKAYDRQLDSGDNPYLKYNHADAEFQERLKEDTSFGGNLGRAVFQAKKRVLEPLGLVEEPVKTAPGKKRPVEHSPVEPDSSSGTGKAGQQPARKRLNFGQTGDANSVPDPQPLGQPPAAPSGLGTNTMATGSGAPMADNNEGADGVGNSSGNWHCDSTWMGDRVITTSTRTWALPTYNNHLYKQISSQSGASNDNHYFGYSTPWGYFDFNRFHCHFSPRDWQRLINNNWGFRPKRLKFKLFNIQVKEVTQNDGTTTIANNLTSTVQVFTDSEYQLPYVLGSAHQGCLPPFPADVFMVPQYGYLTLNNGSRAVGRSSFYCLEYFPSQMLRTGNNFTFSYTFEDVPFHSSYAHSQSLDRLMNPLIDQYLYYLSRTDTPSGTTTQSRLQFSQAGASDIRDQSRNWLPGPCYRQQRVSKTSADNNNSEYSWTGATKYHLNGRDSLVNPGPAMASHKDDEEKFFPQSGVLIFGKQGSEKTSVDIEKVMITDEEEIRTTNPVATEQYGSVSTNLQRGNRQAATADVNTQGVLPGMVWQDRDVYLQGPIWAKIPHTDGHFHPSPLMGGFGLKHPPPQILIKNTPVPANPSTTFSAAKFASFITQYSTGQVSVEIEWELQKENSKRWNPEVQYTSNYNKSVNVDFTVDTNGVYTEPRPIGTRYLTRNL

SEQ ID NO: 564 - DNA, 2211 bp, Artificial Sequence
  Description of Artificial Sequence: Synthetic polynucleotide
atggctgccgatggttatcttccagattggctcgaggacactctctctgaaggaataagacagtggtggaagctcaaacctggcccaccaccaccaaagcccgcagagcggcataaggacgacagcaggggtcttgtgcttcctgggtacaagtacctcggacccttcaacggactcgacaagggagagccggtcaacgaggcagacgccgcggccctcgagcacgacaaggcctacgaccagcagctcaaagcgggtgacaatccgtacctgcggtataaccacgccgacgccgagtttcaggagcgtctgcaagaagatacgtcttttgggggcaacctcgggcgagcagtcttccaggccaagaagcgggttctcgaacctctcggtctggttgaggaaggcgctaagacggctcctggaaagaaacgtccggtagagcagtcgccacaagagccagactcctcctcgggcatcggcaagacaggccagcagcccgctaaaaagagactcaattttggtcagactggcgactcagagtcagtccccgacccacaacctctcggagaacctccagcaacccccgctgctgtgggacctactacaatggcttcaggcggtggcgcaccaatggcagacaataacgaaggcgccgacggagtgggtaatgcctcaggaaattggcattgcgattccacatggctgggcgacagagtcatcaccaccagcacccgaacatgggccttgcccacctataacaaccacctctacaagcaaatctccagtgcttcgacgggggccagcaacgacaaccactacttcggctacagcaccccctgggggtattttgactttaacagattccactgccacttttcaccacgtgactggcagcgactcatcaacaataactggggattccggcccaagagactcagcttcaagctcttcaacatccaggtcaaggaggtcacgacgaatgatggcgtcacaaccatcgctaataaccttaccagcacggttcaagtcttctcggactcggagtaccagcttccgtacgtcctcggctctgcgcaccagggctgcctccctccgttcccggcggacgtgttcatgattccgcaatacggctacctgacgctcaacaatggcagccaagccgtgggacgttcatccttttactgcctggaatatttcccttctcagatgctgagaacgggcaacaactttaccttcagctacacctttgaggaagtgcctttccacagcagctacgcgcacagccagagcctggaccggctgatgaatcctctcatcgatcaatacctgtattacctgaacagaactcaaaatcagtccggaagtgcccaaaacaaggacttgctgtttagccgtgggtctccagctggcatgtctgttcagcccaaaaactggctacctggaccctgttatcggcagcagcgcgtttctaaaacaaaaacagacaacaacaacagcaattttacctggactggtgcttcaaaatataacctcaatgggcgtgaatccatcatcaaccctggcactgctatggcctcacacaaagacgacgaagacaagttctttcccatgagcggtgtcatgatttttggaaaagagagcgccggagcttcaaacactgcattggacaatgtcatgattacggacgaagaggaaattaaagccactaaccctgtggccaccgaaagatttgggaccgtggcagtcaatttccagagcagcagcacagaccctgcgaccggagatgtgcatgctatgggagcattacctggcatggtgtggcaagatagagacgtgtacctgcagggtcccatttgggccaaaattcctcacacagatggacactttcacccgtctcctcttatgggcggctttggactcaagaacccgcctcctcagatcctcatcaaaaacacgcctgttcctgcgaatcctccggcggagttttcagctacaaagtttgcttcattcatcactcaatactccacaggacaagtgagcgtggaaattgaatgggagctgcagaaagaaaacagcaaacgctggaatcccgaagtgcagtatacatctaactatgcaaaatctgccaacgttgatttcactgtggacaacaatggactttatactgagcctcgccccattggcacccgttacctcacccgtcccctgtaa

SEQ ID NO: 565 - protein, 736 aa, Artificial Sequence
  Description of Artificial Sequence: Synthetic polypeptide
MAADGYLPDWLEDTLSEGIRQWWKLKPGPPPPKPAERHKDDSRGLVLPGYKYLGPFNGLDKGEPVNEADAAALEHDKAYDQQLKAGDNPYLRYNHADAEFQERLQEDTSFGGNLGRAVFQAKKRVLEPLGLVEEGAKTAPGKKRPVEQSPQEPDSSSGIGKTGQQPAKKRLNFGQTGDSESVPDPQPLGEPPATPAAVGPTTMASGGGAPMADNNEGADGVGNASGNWHCDSTWLGDRVITTSTRTWALPTYNNHLYKQISSASTGASNDNHYFGYSTPWGYFDFNRFHCHFSPRDWQRLINNNWGFRPKRLSFKLFNIQVKEVTTNDGVTTIANNLTSTVQVFSDSEYQLPYVLGSAHQGCLPPFPADVFMIPQYGYLTLNNGSQAVGRSSFYCLEYFPSQMLRTGNNFTFSYTFEEVPFHSSYAHSQSLDRLMNPLIDQYLYYLNRTQNQSGSAQNKDLLFSRGSPAGMSVQPKNWLPGPCYRQQRVSKTKTDNNNSNFTWTGASKYNLNGRESIINPGTAMASHKDDEDKFFPMSGVMIFGKESAGASNTALDNVMITDEEEIKATNPVATERFGTVAVNFQSSSTDPATGDVHAMGALPGMVWQDRDVYLQGPIWAKIPHTDGHFHPSPLMGGFGLKNPPPQILIKNTPVPANPPAEFSATKFASFITQYSTGQVSVEIEWELQKENSKRWNPEVQYTSNYAKSANVDFTVDNNGLYTEPRPIGTRYLTRPL

SEQ ID NO: 566 - protein, 735 aa, Artificial Sequence
  Description of Artificial Sequence: Synthetic polypeptide
MAADGYLPDWLEDTLSEGIRQWWKLKPGPPPPKPAERHKDDSRGLVLPGYKYLGPFNGLDKGEPVNEADAAALEHDKAYDRQLDSGDNPYLKYNHADAEFQERLKEDTSFGGNLGRAVFQAKKRVLEPLGLVEEPVKTAPGKKRPVEHSPVEPDSSSGTGKAGQQPARKRLNFGQTGDADSVPDPQPLGQPPAAPSGLGTNTMATGSGAPMADNNEGADGVGNSSGNWHCDSTWMGDRVITTSTRTWALPTYNNHLYKQISSQSGASNDNHYFGYSTPWGYFDFNRFHCHFSPRDWQRLINNNWGFRPKRLKFKLFNIQVKEVTQNDGTTTIANNLTSTVQVFTDSEYQLPYVLGSAHQGCLPPFPADVFMVPQYGYLTLNNGSQAVGRSSFYCLEYFPSQMLRTGNNFTFSYTFEDVPFHSSYAHSQSLDRLMNPLIDQYLYYLSRTDTPSGTTTQSRLQFSQAGASDIRNQSRNWLPGPCYRQQRVSKTSADNNNSEYSWTGATKYHLNGRDSLVNPGPAMASHKDDEEKFFPQSGVLIFGKQGSEKTSVDIEKVMITDEEEIRTTNPVATEQYGSVSTNLQRGNRQAATADVNTQGVLPGMVWQDRDVYLQGPIWAKIPHTDGHFHPSPLMGGFGLKHPPPQILIKNTPVPANPSTTFSAAKFASFITQYSTGQVSVEIEWELQKENSKRWNPEVQYTSNYNKSVNVDFTVDTNGVYSEPRPIGTRYLTRNQ

SEQ ID NO: 567 - DNA, 2208 bp, Artificial Sequence
  Description of Artificial Sequence: Synthetic polynucleotide
atggctgccgatggttatcttccagattggctcgaggacactctctctgaaggaataagacagtggtggaagctcaaacctggcccaccaccaccaaagcccgcagagcggcataaggacgacagcaggggtcttgtgcttcctgggtacaagtacctcggacccttcaacggactcgacaagggagagccggtcaacgaggcagacgccgcggccctcgagcacgacaaagcctatgaccggcagctcgacagcggagacaacccgtacctcaagtacaaccacgccgacgcggagtttcaggaacgccttaaagaagatacgtcttttgggggcaacctcggacgagcagtcttccaggcgaaaaagagggttcttgaacctctgggcctggttgaggaacctgttaagacggctccgggaaaaaagaggccggtagagcactctcctgtggagccagactcctcctcgggaaccggaaaggcgggccagcagcctgcaagaaaaagattgaattttggtcagactggagacgcagactcagtacctgacccccagcctctcggacagccaccagcagccccctctggtctgggaactaatacgatggctacaggcagtggcgcaccaatggcagacaataacgagggcgccgacggagtgggtaattcctcgggaaattggcattgcgattccacatggatgggcgacagagtcatcaccaccagcacccgaacctgggccctgcccacctacaacaaccacctctacaaacaaatttccagccaatcaggagcctcgaacgacaatcactactttggctacagcaccccttgggggtattttgacttcaacagattccactgccacttttcaccacgtgactggcaaagactcatcaacaacaactggggattccgacccaagagactcaagttcaagctctttaacattcaagtcaaagaggtcacgcagaatgacggtacgacgacgattgccaataaccttaccagcacggttcaggtgtttactgactcggagtaccagctcccgtacgtcctcggctcggcgcatcaaggatgcctcccgccgttcccagcagacgtcttcatggtgccacagtatggatacctcaccctgaacaacgggagtcaggcagtaggacgctcttcattttactgcctggagtactttccttctcagatgctgcgtaccggtaacaactttaccttcagctacacttttgaggacgttcctttccacagcagctacgctcacagccagagtctggaccgtctcatgaatcctctcatcgaccagtacctgtattacttgagcagaacagacactccaagtggaaccaccacgcagtcaaggcttcagttttctcaggccggagcgagtgacattcggaaccagtctaggaactggcttcctggaccctgttaccgccagcagcgagtatcaaagacatctgcggataacaacaacagtgaatactcgtggactggagctaccaagtaccacctcaatggcagagactctctggtgaatccgggcccggccatggcaagccacaaggacgatgaagaaaagttttttcctcagagcggggttctcatctttgggaagcaaggctcagagaaaacaagtgtggacattgaaaaggtcatgattacagacgaagaggaaatcaggacaaccaatcccgtggctacggagcagtatggttctgtatctaccaacctccagagaggcaacagacaagcagctaccgcagatgtcaacacacaaggcgttcttccaggcatggtctggcaggacagagatgtgtaccttcaggggcccatctgggcaaagattccacacacggacggacattttcacccctctcccctcatgggtggattcggacttaaacaccctcctccacagattctcatcaagaacaccccggtacctgcgaatccttcgaccaccttcagtgcggcaaagtttgcttccttcatcacacagtactccacgggacaggtcagcgtggagatcgagtgggagctgcagaaggaaaacagcaaacgctggaatcccgaagttcagtacacttccaactacaacaagtctgttaatgtggactttactgtggacactaatggcgtgtattcagagcctcgccccattggcaccagatacctgactcgtaatcagtaa

SEQ ID NO: 568 - DNA, 2208 bp, Artificial Sequence
  Description of Artificial Sequence: Synthetic polynucleotide
atggctgccgatggttatcttccagattggctcgaggacactctctctgaaggaataagacagtggtggaagctcaaacctggcccaccaccaccaaagcccgcagagcggcataaggacgacagcaggggtcttgtgcttcctgggtacaagtacctcggacccttcaacggactcgacaagggagagccggtcaacgaggcagacgccgcggccctcgagcacgacaaagcctatgaccggcagctcgacagcggagacaacccgtacctcaagtacaaccacgccgacgcggagtttcaggagcgccttaaagaagatacgtcttttgggggcaacctcggacgagcagtcttccaggcgaaaaagagggttcttgaacctctgggcctggttgaggaacctgttaagacggctccgggaaaaaagaggccggtagagcactctcctgtggagccagactcctcctcgggaaccggaaaggcgggccagcagcctgcaagaaaaagattgaattttggtcagactggagacgcagactcagtacctgatccccagcctctcggacagccaccagcagccccctctggtctgggaactaatacgatggctacaggcagtggcgcaccaatggcagacaataacgagggcgccgacggagtgggtaattcctcgggaaattggcattgcgattccacatggatgggcgacagagtcatcaccaccagcacccgaacctgggccctgcccacctacaacaaccacctctacaaacaaatttccagccaatcaggagcctcgaacgacaatcactactttggctacagcaccccttgggggtattttgacttcaacagattccactgccacttttcaccacgtgactggcaaagactcatcaacaacaactggggattccgacccaagagactcaagttcaagctctttaacattcaagtcaaagaggtcacgcagaatgacggtacgacgacgattgccaataaccttaccagcacggttcaggtgtttactgactcggagtaccagctcccgtatgtcctcggctcggcgcatcaaggatgcctcccgccgttcccagcagacgtcttcatggtgccacagtatggatacctcaccctgaacaacgggagtcaggcagtaggacgctcttcattttactgcctggagtactttccttctcagatgctgcgtaccggtaacaactttaccttcagctacacttttgaggacgttcctttccacagcagctacgctcacagccagagtctggaccgtctcatgaatcctctcatcgaccagtacctgtattacttgagcagaacagacactccaagtggaaccaccacgcagtcaaggcttcagttttctcaggccggagcgagtgacattcgggaccagtctaggaactggcttcctggaccctgttaccgccagcagcgagtatcaaagacatctgcggataacaacaacagtgaatactcgtggactggagctaccaagtaccacctcaatggcagagactctctggtgaatccgggcccggccatggcaagccacaaggacgatgaagaaaagttttttcctcagagcggggttctcatctttgggaagcaaggctcagagaaaacaagtgtggacattgaaaaggtcatgattacagacgaagaggaaatcaggacaaccaatcccgtggctacggagcagtatggttctgtatctaccaacctccagagaggcaacagacaagcagctaccgcagatgtcaacacacaaggcgttcttccaggcatggtctggcaggacagagatgtgtaccttcaggggcccatctgggcaaagattccacacacggacggacattttcacccctctcccctcatgggtggattcggacttaaacaccctcctccacagattctcatcaagaacaccccggtacctgcgaatccttcgaccaccttcagtgcggcaaagtttgcttccttcatcacacagtactccacgggacaggtcagcgtggagatcgagtgggagctgcagaaggaaaacagcaaacgctggaatcccgaagttcagtacacttccaactacaacaagtctgttaatgtggactttactgtggacactaatggcgtgtattcagagcctcgccccattggcaccagatacctgactcgtaatctgtaa

SEQ ID NO: 569 - protein, 735 aa, Artificial Sequence
  Description of Artificial Sequence: Synthetic polypeptide
MAADGYLPDWLEDTLSEGIRQWWKLKPGPPPPKPAERHKDDSRGLVLPGYKYLGPFNGLDKGEPVNEADAAALEHDKAYDRQLDSGDNPYLKYNHADAEFQERLKEDTSFGGNLGRAVFQAKKRVLEPLGLVEEPVKTAPGKKRPVEHSPVEPDSSSGTGKAGQQPARKRLNFGQTGDADSVPDPQPLGQPPAAPSGLGTNTMATGSGAPMADNNEGADGVGNSSGNWHCDSTWMGDRVITTSTRTWALPTYNNHLYKQISSQSGASNDNHYFGYSTPWGYFDFNRFHCHFSPRDWQRLINNNWGFRPKRLKFKLFNIQVKEVTQNDGTTTIANNLTSTVQVFTDSEYQLPYVLGSAHQGCLPPFPADVFMVPQYGYLTLNNGSQAVGRSSFYCLEYFPSQMLRTGNNFTFSYTFEDVPFHSSYAHSQSLDRLMNPLIDQYLYYLSRTDTPSGTTTQSRLQFSQAGASDIRDQSRNWLPGPCYRQQRVSKTSADNNNSEYSWTGATKYHLNGRDSLVNPGPAMASHKDDEEKFFPQSGVLIFGKQGSEKTSVDIEKVMITDEEEIRTTNPVATEQYGSVSTNLQRGNRQAATADVNTQGVLPGMVWQDRDVYLQGPIWAKIPHTDGHFHPSPLMGGFGLKHPPPQILIKNTPVPANPSTTFSAAKFASFITQYSTGQVSVEIEWELQKENSKRWNPEVQYTSNYNKSVNVDFTVDTNGVYSEPRPIGTRYLTRNL

SEQ ID NO: 570 - DNA, 2601 bp, Artificial Sequence
  Description of Artificial Sequence: Synthetic polynucleotide
ccatcgacgtcagacgcggaagcttcgatcaactacgcggacaggtaccaaaacaaatgttctcgtcacgtgggcatgaatctgatgctgtttccctgcagacaatgcgagagactgaatcagaattcaaatatctgcttcactcacggtgtcaaagactgtttagagtgctttcccgtgtcagaatctcaacccgtttctgtcgtcaaaaaggcgtatcagaaactgtgctacattcatcacatcatgggaaaggtgccagacgcttgcactgcttgcgacctggtcaatgtggacttggatgactgtgtttctgaacaataaatgacttaaaccaggtatgactgccgatggttatcttccagattggctcgaggacaaccttagtgaaggaattcgcgagtggtgggctttgaaacctggagcccctcaacccaaggcaaatcaacaacatcaagacaacgctcgaggtcttgtgcttccgggttacaaataccttggacccggcaacggactcgacaagggggagccggtcaacgcagcagacgcggcggccctcgagcacgacaaggcctacgaccagcagctcaaggccggagacaacccgtacctcaagtacaaccacgccgacgccgagttccaggagcggctcaaagaagatacgtcttttgggggcaacctcgggcgagcagtcttccaggccaaaaagaggcttcttgaacctcttggtctggttgaggaagcggctaagacggctcctggaaagaagaggcctgtagagcagtctcctcaggaaccggactcctccgcgggtattggcaaatcgggtgcacagcccgctaaaaagagactcaatttcggtcagactggcgacacagagtcagtcccagaccctcaaccaatcggagaacctcccgcagccccctcaggtgtgggatctcttacaatggcttcaggtggtggcgcaccagtggcagacaataacgaaggtgccgatggagtgggtagttcctcgggaaattggcattgcgattcccaatggctgggggacagagtcatcaccaccagcacccgaacctgggccctgcccacctacaacaatcacctctacaagcaaatctccaacagcacatctggaggatcttcaaatgacaacgcctacttcggctacagcaccccctgggggtattttgacttcaacagattccactgccacttctcaccacgtgactggcagcgactcatcaacaacaactggggattccggcctaagcaactcaacttcaagctcttcaacattcaggtcaaagaggttacggacaacaatggagtcaagaccatcgccaataaccttaccagcacggtccaggtcttcacggactcagactatcagctcccgtacgtgctcgggtcggctcacgagggctgcctcccgccgttcccagcggacgttttcatgattcctcagtacgggtatctgacgcttaatgatggaagccaggccgtgggtcgttcgtccttttactgcctggaatatttcccgtcgcaaatgctaagaacgggtaacaacttccagttcagctacgagtttgagaacgtacctttccatagcagctacgctcacagccaaagcctggaccgactaatgaatccactcatcgaccaatacttgtactatctctcaaagactattaacggttctggacagaatcaacaaacgctaaaattcagtgtggccggacccagcaacatggctgtccagggaagaaactacatacctggacccagctaccgacaacaacgtgtctcaaccactgtgactcaaaacaacaacagcgaatttgcttggcctggagcttcttcttgggctctcaatggacgtaatagcttgatgaatcctggacctgctatggccagccacaaagaaggagaggaccgtttctttcctttgtctggatctttaatttttggcaaacaaggaactggaagagacaacgtggatgcggacaaagtcatgataaccaacgaagaagaaattaaaactactaacccggtagcaacggagtcctatggacaagtggccacaaaccaccagagtgcccaagcacaggcgcagaccggctgggttcaaaaccaaggaatacttccgggtatggtttggcaggacagagatgtgtacctgcaaggacccatttgggccaaaattcctcacacggacggcaactttcacccttctccgctgatgggagggtttggaatgaagcacccgcctcctcagatcctcatcaaaaacacacctgtacctgcggatcctccaacggccttcaacaaggacaagctgaactctttcatcacccagtattctactggccaagtcagcgtggagatcgagtgggagctgcagaaggaaaacagcaagcgctggaacccggagatccagtacacttccaactattacaagtctaataatgttgaatttgctgttaatactgaaggtgtatatagtgaaccccgccccattggcaccagatacctgactcgtaatctgtaattgcttgttaatcaataaaccgtttaattcgtttcagttgaactgcggcc

SEQ ID NO: 571 - DNA, 2601 bp, Artificial Sequence
  Description of Artificial Sequence: Synthetic polynucleotide
ccatcgacgtcagacgcggaagcttcgatcaactacgcggacaggtaccaaaacaaatgttctcgtcacgtgggcatgaatctgatgctgtttccctgcagacaatgcgagagactgaatcagaattcaaatatctgcttcactcacggtgtcaaagactgtttagagtgctttcccgtgtcagaatctcaacccgtttctgtcgtcaaaaaggcgtatcagaaactgtgctacattcatcacatcatgggaaaggtgccagacgcttgcactgcttgcgacctggtcaatgtggacttggatgactgtgtttctgaacaataaatgacttaaaccaggtatggctgccgatggttatcttccagattggctcgaggacaaccttagtgaaggaattcgcgagtggtgggctttgaaacctggagcccctcaacccaaggcaaatcaacaacatcaagacaacgctcgaggtcttgtgcttccgggttacaaataccttggacccggcaacggactcgacaagggggagccggtcaacgcagcagacgcggcggccctcgagcacgacaaggcctacgaccagcagctcaaggccggagacaacccgtacctcaagtacaaccacgccgacgccgagttccaggagcggctcaaagaagatacgtcttttgggggcaacctcgggcgagcagtcttccaggccaaaaagaggcttcttgaacctcttggtctggttgaggaagcggctaagacggctcctggaaagaagaggcctgtagagcagtctcctcaggaaccggactcctccgcgggtattggcaaatcgggtgcacagcccgctaaaaagagactcaatttcggtcagactggcgacacagagtcagtcccagaccctcaaccaatcggagaacctcccgcagccccctcaggtgtgggatctcttacaatggcttcaggtggtggcgcaccagtggcagacaataacgaaggtgccgatggagtgggtagttcctcgggaaattggcattgcgattcccaatggctgggggacagagtcatcaccaccagcacccgaacctgggccctgcccacctacaacaatcacctctacaagcaaatctccaacagcacatctggaggatcttcaaatgacaacgcctacttcggctacagcaccccctgggggtattttgacttcaacagattccactgccacttctcaccacgtgactggcagcgactcatcaacaacaactggggattccggcctaagcgactcaacttcaagctcttcaacattcaggtcaaagaggttacggacaacaatggagtcaagaccatcgccaataaccttaccagcacggtccaggtcttcacggactcagactatcagctcccgtacgtgctcgggtcggctcacgagggctgcctcccgccgttcccagcggacgttttcatgattcctcagtacgggtatctgacgcttaatgatggaagccaggccgtgggtcgttcgtccttttactgcctggaatatttcccgtcgcaaatgctaagaacgggtaacaacttccagttcagctacgagtttgagaacgtacctttccatagcagctacgctcacagccaaagcctggaccgactaatgaatccactcatcgaccaatacttgtactatctctcaaagactattaacggttctggacagaatcaacaaacgctaaaattcagtgtggccggacccagcaacatggctgtccagggaagaaactacatacctggacccagctaccgacaacaacgtgtctcaaccactgtgactcaaaacaacaacagcgaatttgcttggcctggggcttcttcttgggctctcaatggacgtaatagcttgatgaatcctggacctgctatggccagccacaaagaaggagaggaccgtttctttcctttgtctggatctttaatttttggcaaacaaggaactggaagagacaacgtggatgcggacaaagtcatgataaccaacgaagaagaaattaaaactactaacccggtagcaacggagtcctatggacaagtggccacaaaccaccagagtgcccaagcacaggcgcagaccggctgggttcaaaaccaaggaatacttccgggtatggtttggcaggacagagatgtgtacctgcaaggacccatttgggccaaaattcctcacacgggcggcaactttcacccttctccgctgatgggagggtttggaatgaagcacccgcctcctcagatcctcatcaaaaacacacctgtacctgcggatcctccaacggccttcaacaaggacaagctgaactctttcatcacccagtattctactggccaagtcagcgtggagatcgagtgggagctgcagaaggaaaacagcaagcgctggaacccggagatccagtacacttccaactattacaagtctaataatgttgaatttgctgttaatactggaggtgtatatagtgaaccccgccccattggcaccagatacctgactcgtaatctgtaattgcttgttaatcaataaaccgtttaattcgtttcagttgaactgcggcc

SEQ ID NO: 572 - DNA, 2601 bp, Artificial Sequence
  Description of Artificial Sequence: Synthetic polynucleotide
ccatcgacgtcagacgcggaagcttcgatcaactacgcggacaggtaccaaaacaaatgttctcgtcacgtgggcatgaatctgatgctgtttccctgcagacaatgcgagagactgaatcagaattcaaatatctgcttcactcacggtgtcaaagactgtttagagtgctttcccgtgtcagaatctcaacccgtttctgtcgtcaaaaaggcgtatcagaaactgtgctacattcatcacatcatgggaaaggtgccagacgcttgcactgcttgcgacctggtcaatgtggactcggatgactgtgtttctgaacaataaatgacttaaaccaggtatggctgccgatggttatcttccagattggctcgaggacaaccttagtgaaggaattcgcgagtggtgggctttgaaacctggagcccctcaacccaaggcaaatcaacaacatcaagacaacgctcgaggtcttgtgcttccgggttacaaataccttggacccggcaacggactcgacaagggggagccggtcaacgcagcagacgcggcggccctcgagcacgacaaggcctacgaccagcagctcaaggccggagacaacccgtacctcaagtacaaccacgccgacgccgagttccaggagcggctcaaagaagatacgtcttttgggggcaacctcgggcgagcagtcttccaggccaaaaagaggcttcttgaacctcttggtctggttgaggaagcggctaagacggctcctggaaagaagaggcctgtagagcagtctcctcaggaaccggactcctccgcgggtattgacaaatcgggtgcacagcccgctaaaaagagactcaatttcggtcagactggcgacacagagtcagtcccagaccctcaaccaatcggagaacctcccgcagccccctcaggtgtgggatctcttacaatggcttcaggtggtggcgcaccagtggcagacaataacgaaggtgccgatggagtgggtagttcctcgggaaattggcattgcgattcccaatggctgggggacagagtcatcaccaccagcacccgaacctgggccctgcccacctacaacaatcacctctacaagcaaatctccaacagcacatctggaggatcttcaaatgacaacgcctacttcggctacagcaccccctgggggtattttgacttcaacagattccactgccacttctcaccacgtgactggcagcgactcatcaacaacaactggggattccggcctaagcgactcaacttcaagctcttcaacattcaggtcaaagaggttacggacaacaatggagtcaagaccatcgccaataaccttaccagcacggtccaggtcttcacggactcggactatcagctcccgtacgtgctcgggtcggctcacgagggctgcctcccgccgttcccagcggacgttttcatgattcctcagtacgggtatctgacgcttaatgatggaagccaggccgtgggtcgttcgtccttttactgcctggaatatttcccgtcgcaaatgctaagaacgggtaacaacttccagttcagctacgagtttgagaacgtacctttccatagcagctacgctcacagccaaagcctggaccgactaatgaatccactcatcgaccaatacttgtactatctctcaaagactattaacggttctggacagaatcaacaaacgctaaaattcagtgtggccggacccagcaacatggctgtccagggaagaaactacatacctggacccagctaccgacaacaacgtgtctcaaccactgtgactcaaaacaacaacagcgaatttgcttggcctggagcttcttcttgggctctcaatggacgtaatagcttgatgaatcctggacctgctatggccagccacaaagaaggagaggaccgtttctttcctttgtctggatctttaatttttggcaaacaaggaactggaagagacaacgtggatgcggacaaagtcatgataaccaacgaagaagaaattaaaactactaacccggtagcaacggagtcctatggacaagtggccacaaaccaccagagtgcccaagcacaggcgcagaccggctgggttcaaaaccaaggaatacttccgggtatggtttggcaggacagagatgtgtacctgcaaggacccatttgggccaaaattcctcacacggacggcaactttcacccttctccgctgatgggagggtttggaatgaagcacccgcctcctcagatcctcatcaaaaacacacctgtacctgcggatcctccaacggccttcaacaaggacaagctgaactctttcatcacccagtattctactggccaagtcagcgtggagatcgagtgggagctgcagaaggaaaacagcaagcgctggaacccggagatccagtacacttccaactattacaagtctaataatgttgaatttgctgttaatactgaaggtgtatatagtgaaccccgccccattggcaccagatacctgactcgtaatctgtaattgcttgttaatcaataaaccgtttaattcgtttcagttgaactgcggcc

SEQ ID NO: 573 - DNA, 2601 bp, Artificial Sequence
  Description of Artificial Sequence: Synthetic polynucleotide
ccatcgacgtcagacgcggaagcttcgatcaactacgcggacaggtaccaaaacaaatgttctcgtcacgtgggcatgaatctgatgctgtttccctgcagacaatgcgagagactgaatcagaattcaaatatctgcttcactcacggtgtcaaagactgtttagagtgctttcccgtgtcagaatctcaacccgtttctgtcgtcaaaaaggcgtatcagaaactgtgctacattcatcacatcatgggaaaggtgccagacgcttgcactgcttgcgacctggtcaatgtggacttggatgactgtgtttctgaacaataaatgacttaaaccaggtatggctgccgatggttatcttccagattggctcgaggacaaccttagtgaaggaattcgcgagtggtgggctttgaaacctggagcccctcaacccaaggcaaatcaacaacatcaagacaacgctcgaggtcttgtgcttccgggttacaaataccttggacccggcaacggactcgacaagggggagccggtcaacgcagcagacgcggcggccctcgagcacgacaaggcctacgaccagcagctcaaggccggagacaacccgtacctcaagtacaaccacgccgacgccgagttccaggagcggctcaaagaagatacgtcttttgggggcaacctcgggcgagcagtcctccaggccaaaaagaggcttcttgaacctcttggtctggttgaggaagcggctaagacggctcctggaaagaagaggcctgtagagcagtctcctcaggaaccggactcctccgcgggtattggcaaatcgggtgcacagcccgctaaaaagagactcaatttcggtcagactggcgacacagagtcagtcccagaccctcaaccaatcggagaacctcccgcagccccctcaggtgtgggatctcttacaatggcttcaggtggtggcgcaccagtggcagacaataacgaaggtgccgatggagtgggtagttcctcgggaaattggcattgcgattcccaatggctgggggacagagtcatcaccaccagcacccgaacctgggccctgcccacctacaacaatcacctctacaagcaaatctccaacagcacatctggaggatcttcaaatgacaacgcctacttcggctacagcaccccctgggggtattttgacttcaacagattccactgccacttctcaccacgtgactggcagcgactcatcaacaacaactggggattccggcctaagcgactcaacttcaagctcttcaacattcaggtcaaagaggttacggacaacaatggagtcaagaccatcgccaataaccttaccagcacggtccaggtcttcacggactcagactatcagctcccgtacgtgctcgggtcggctcacgagggctgcctcccgccgttcccagcggacgttttcatgattcctcagtacgggtatctgacgcttaatgatggaagccaggccgtgggtcgttcgtccttttactgcctggaatatttcccgtcgcaaatgctaagaacgggtaacaacttccagttcagctacgagtttgagaacgtacctttccatagcagctacgctcacagccaaagcctggaccgactaatgaatccactcatcgaccaatacttgtactatctctcaaagactattaacggttctggacagaatcaacaaacgctaaaattcagtgtggccggatccagcaacatggctgtccagggaagaaactacatacctggacccagctaccgacaacaacgtgtctcaaccactgtgactcaaaacaacaacagcgaatttgcttggcctggagcttcttcttgggctctcaatggacgtaatagcttgatgaatcctggacctgctatggccagccacaaagaaggagaggaccgtttctttcctttgtctggatctttaatttttggcaaacaaggaactggaagagacaacgtggatgcggacaaagtcatgataaccaacgaagaagaaattaaaactactaacccggtagcaacggagtcctatggacaagtggccacaaaccaccagagtgcccaagcacaggcgcagaccggctgggttcaaaaccaaggaatacttccaggtatggtttggcaggacagagatgtgtacctgcaaggacccatttgggccaaaattcctcacacggacggcaactttcacccttctccgctgatgggagggtttggaatgaagcacccgcctcctcagatcctcatcaaaaacacacctgtacctgcggatcctccaacggccttcaacaaggacaagctgaactctttcatcacccagtattctactggccaagtcagcgtggagatcgagtgggagctgcagaaggaaaacagcaagcgctggaacccggagatccagtacacttccaactattacaagtctaataatgttgaatttgctgttaatactgaaggtgtatatagtgaaccccgccccattggcaccagatacctgactcgtaatctgtaattgcttgttaatcaataaaccgtttaattcgtttcagttgaactgcggcc

SEQ ID NO: 574 - DNA, 2601 bp, Artificial Sequence
  Description of Artificial Sequence: Synthetic polynucleotide
ccatcgacgtcagacgcggaagcttcgatcaactacgcggacaggtaccaaaacaaatgttctcgtcacgtgggcatgaatctgatgctgtttccctgcagacaatgcgagagactgaatcagaattcaaatatctgcttcactcacggtgtcaaagactgtttagagtgctttcccgtgtcagaatctcaacccgtttctgtcgtcaaaaaggcgtatcagaaactgtgctacattcatcacatcatgggaaaggtgccagacgcttgcactgcttgcgacctggtcaatgtggacttggatgactgtgtttctgaacaataaatgacttaaaccaggtatggctgccgatggttatcttccagattggctcgaggacaaccttagtgaaggaattcgcgagtggtgggctttgaaacctggagcccctcaacccaaggcaaatcaacaacatcaagacaacgctcgaggtcttgtgcttccgggttacaaataccttggacccggcaacggactcgacaagggggagccggtcaacgcagcagacgcggcggccctcgagcacgacagggcctacgaccagcagctcaaggccggagacaacccgtacctcaagtacaaccacgccgacgccgagttccaggagcggctcaaagaagatacgtcttttgggggcaacctcgggcgagcagtcttccaggccaaaaagaggcttcttgaacctcttggtctggttgaggaagcggctaagacggctcctggaaagaagaggcctgtagagcagtctcctcaggaaccggactcctccgcgggtattggcaaatcgggtgcacagcccgctaaaaagagactcaatttcggtcagactggcgacacagagtcagtcccagaccctcaaccaatcggagaacctcccgcagccccctcaggtgtgggatctcttacaatggcttcaggtggtggcgcaccagtggcagacaataacgaaggtgccgatggagtgggtagttcctcgggaaattggcattgcgattcccaatggctgggggacagagtcatcaccaccagcacccgaacctgggccctgcccacctacaacaatcacctctacaagcaaatctccaacagcacatctggaggatcttcaaatgacaacgcctacttcggctacagcaccccctgggggtattttgacttcaacagattccactgccacttctcaccacgtgactggcagcgactcatcaacaacaactggggattccggcctaagcgactcaacttcaagctcttcaacattcaggtcaaagaggttacggacaacaatggagtcaagaccatcgccaataaccttaccagcacggtccaggtcttcacggactcagactatcagctcccgtacgtgctcgggtcggctcacgagggctgcctcccgccgttcccagcggacgttttcatgattcctcagtacgggtatctgacgcttaatgatggaagccaggccgtgggtcgttcgtccttttactgcctggaatatttcccgtcgcaaatgctaagaacgggtaacaacttccagttcagctacgagtttgagaacgtacctttccatagcagctacgctcacagccaaagcctggaccgactaatgaatccactcatcgaccaatacttgtactatctctcaaagactattaacggttctggacagaatcaacaaacgctaaaattcagtgtggccggacctagcaacatggctgtccagggaagaaactacatacctggacccagctaccgacaacaacgtgtctcaaccactgtgactcaaaacaacaacagcgaatttgcttggcctggagcttcttcttgggctctcaatggacgtaatagcttgatgaatcctggacctgctatggccagccacaaagaaggagaggaccgtttctttcctttgtctggatctttaatttttggcaaacaaggaactggaagagacaacgtggatgcggacaaagtcatgataaccaacgaagaagaaattaaaactactaacccggtagcaacggagtcctatggacaagtggccacaaaccaccagagtgcccaagcacaggcgcagaccggctgggttcaaaaccaaggaatacttccgggtatggtttggcaggacagagatgtgtacctgcaaggacccatttgggccaaaattcctcacacggacggcaactttcacccttctccgctgatgggagggtttggaatgaagcacccgcctcctcagatcctcatcaaaaacacacctgtacctgcggatcctccaacggccttcaacaaggacaagctgaactctttcatcacccagtattctactggccaagtcagcgtggagatcgagtgggagctgcagaagaaaaacagcaagcgctggaacccggagatccagtacacttccaactattacaagtctaataatgttgaatttgctgttaacactgaaggtgtatatagtgaaccccgccccattggcaccagatacctgactcgtaatctgtaattgcttgttaatcaataaaccgtttaattcgtttcagttgaactgcggcc

SEQ ID NO: 575 - DNA, 2601 bp, Artificial Sequence
  Description of Artificial Sequence: Synthetic polynucleotide
ccatcgacgtcagacgcggaagcttcgatcaactacgcggacaggtaccaaaacaaatgttctcgtcacgtgggcatgaatctgatgctgtttccctgcagacaatgcgagagactgaatcagaattcaaatatctgcttcactcacggtgtcaaagactgtttagagtgctttcccgtgtcagaatctcaacccgtttctgtcgtcaaaaaggcgtatcagaaactgtgctacattcatcacatcatgggaaaggtgccagacgcttgcactgcttgcgacctggtcaatgtggacttggatgactgtgtttctgaacaataaatgacttaaaccaggtatggctgccgatggttatcttccagattggctcgaggacaaccttagtgaaggaattcgcgagtggtgggctttgaaacctggagcccctcaacccaaggcaaatcaacaacatcaagacaacgctcgaggtcttgtgcttccgggttacaaataccttggacccggcaacggactcgacaagggggagccggtcaacgcagcagacgcggcggccctcgagcacgacaaggcctacgaccagcagctcaaggccggagacaacccgtacctcaagtacaaccacgccgacgccgagttccaggagcggctcaaagaagatacgtcttttgggggcaacctcgggcgagcagtcttccaggccaaaaagaggcttcttgaacctcttggtctggttgaggaagcggctaagacggctcctggaaagaagaggcctgtagagcagtctcctcaggaaccggactcctccgcgggtattggcaaatcgggtgcacagcccgctaaaaagagactcaatttcggtcagactggcgacacagagtcagtcccagaccctcaaccaatcggagaacctcccgcagccccctcaggtgtgggatctcttacaatggcttcaggtggtggcgcaccagtggcagacaataacgaaggtgccgatggagtgggtagttcctcgggaaattggcattgcgattcccaatggctgggggacagagtcatcaccaccagcacccgaacctgggccctgcccacctacaacaatcacctctacaagcaaatctccaacagcacatctggaggatcttcaaatgacaacgcctacttcggctacagcaccccctgggggtattttgacttcaacagattccactgccacttctcaccacgtgactggcagcgactcatcaacaacaactggggattccggcctaagcgactcaacttcaagctcttcaacattcaggtcaaagaggttacggacaacaatggagtcaagaccatcgccaataaccttaccagcacggtccaggtcttcacggactcagactatcagctcccgtacgtgctcgggtcggctcacgagggctgcctcccgccgttcccagcggacgttttcatgattcctcagtacgggtatctgacgcttaatgatggaagccaggccgtgggtcgttcgtccttttactgcctggaatatttcccgtcgcaaatgctaagaacgggtaacaacttccagttcagctacgagtttgagaacgtacctttccatagcagctacgctcacagccaaagcctggaccgactaatgaatccactcatcgaccaatacttgtactatctctcaaagactattaacggttctggacagaatcaacaaacgctaaaattcagtgtggccggacccagcaacatggctgtccagggaagaaactacatacctggacccagctaccgacaacaacgtgtctcaaccactgtgactcaaaacaacaacagcgaatttgcttggcctggagcttcttcttgggctctcaatggacgtaatagcttgatgaatcctggacctgctatggccagccacaaagaaggagaggaccgtttctttcctttgtctggatctttaatttttggcaaacaaggaactggaagagacaacgtggatgcggacaaagtcatgataaccaacgaagaagaaattaaaactactaacccggtagcaacggagtcctatggacaagtggccacaaaccaccagagtgcccaagcacgggcgcagaccggctgggttcaaaaccaaggaatacttccgggtatggtttggcaggacagagatgtgtacctgcaaggacccatttgggccaaaattcctcacacggacggcaactttcacccttctccgctgatgggagggtttggaatgaagcacccgcctcctcagatcctcatcaaaaacacacctgtacctgcggatcctccaacggccttcaacaaggacaagctgaactctttcatcacccagtattctactggccaagtcagcgtggagatcgagtgggagctgcagaaggaaaacagcaagcgctggaacccggagatccagtacacttccaactattacaagtctaataatgttgaatttgctgttaatactgaaggtgtatatagtgaaccccgccccattggcaccagatacctgactcgtaatctgtaattgcttgttaatcaataaaccgtttaattcgtttcagttgaactgcggcc

SEQ ID NO: 576 - DNA, 2601 bp, Artificial Sequence
  Description of Artificial Sequence: Synthetic polynucleotide
ccatcgacgtcagacgcggaagcttcgatcaactacgcggacaggtaccaaaacaaatgttctcgtcacgtgggcatgaatctgatgctgtttccctgcagacaatgcgagagactgaatcagaattcaaatatctgcttcactcacggtgtcaaagactgtttagagtgctttcccgtgtcagaatctcaacccgtttctgtcgtcaaaaaggcgtatcagaaactgtgctacattcatcacatcatgggaaaggtgccagacgcttgcactgcttgcgacctggtcaatgtggacttggatgactgtgtttctgaacaataaatgacttaaaccaggtatggctgccgatggttatcttccagattggctcgaggacaaccttagtgaaggaattcgcgagtggtgggctttgaaacctggagcccctcaacccaaggcaaatcaacaacatcaagacaacgctcgaggtcttgtgcttccgggttacaaataccttggacccggcaacggactcgacaagggggagccggtcaacgcagtagacgcggcggccctcgagcacgacaaggcctacgaccagcagctcaaggccggagacaacccgtacctcaagtacaaccacgccgacgccgagttccaggagcggctcaaagaagatacgtcttttgggggcaacctcgggcgagcagtcttccaggccaaaaagaggcttcttgaacctcttggtctggttgaggaagcggctaagacggctcctggaaagaagaggcctgtagagcagtctcctcaggaaccggactcctccgcgggtattggcaaatcgggtgcacagcccgctaaaaagagactcaatttcggtcagactggcgacacagagtcagtcccagaccctcaaccaatcggagaacctcccgcagccccctcaggtgtgggatctcttacaatggcttcaggtggtggcgcaccagtggcagacaataacgaaggtgccgatggagtgggtagttcctcgggaaattggcattgcgattcccaatggctgggggacagagtcatcaccaccagcacccgaacctgggccctgcccacctacaacaatcacctctacaagcaaatctccaacagcacatctggaggatcttcaaatgacaacgcctacttcggctacagcaccccctgggggtattttgacttcaacagattccactgccacttctcaccacgtgactggcagcgactcatcaacaacaactggggatttcggcctaagcgactcaacttcaagctcttcaacattcaggtcaaagaggttacggacaacaatggagtcaagaccatcgccaataaccttaccagcacggtccaggtcttcacggactcagactatcagctcccgtacgtgctcgggtcggctcacgagggctgcctcccgccgttcccagcggacgttttcatgattcctcagtacgggtatctgacgcttaatgatggaagccaggccgtgggtcgttcgtccttttactgcctggaatatttcccgtcgcaaatgctaagaacgggtaacaacttccagttcagctacgagtttgagaacgtacctttccatagcagctacgctcacagccaaagcctggaccgactaatgaatccactcatcgaccaatacttgtactatctctcaaagactattaacggttctggacagaatcaacaaacgctaaaattcagtgtggccggacccagcaacatggctgtccagggaagaaactacatacctggacccagctaccgacaacaacgtgtctcaaccactgtgactcaaaacaacaacagcgaatttgcttggcctggagcttcttcttgggctctcaatggacgtaatagcttgatgaatcctggacctgctatggccagccacaaagaaggagaggaccgtttctttcctttgtctggatctttaatttttggcaaacaaggaactggaagagacaacgtggatgcggacaaagtcatgataaccaacgaagaagaaattaaaactactaacccggtagcaacggagtcctatggacaagtggccacaaaccaccagagtgcccaagcacaggcgcagaccggctgggttcaaaaccaaggaatacttccgggtatggtttggcaggacagagatgtgtacctgcaaggacccatttgggccaaaattcctcacacggacggcaactttcacccttctccgctgatgggagggtttggaatgaagcacccgcctcctcagatcctcatcaaaaacacacctgtacctgcggatcctccaacggccttcaacaaggacaagctgaactctttcatcacccagtattctactggccaagtcagcgtggagatcgagtgggagctgcagaaggaaaacagcaagcgctggaacccggagatccagtacacttccaactattacaagtctaataatgttgaatttgctgttaatactgaaggtgtatatagtgaaccccgccccattggcaccagatacctgactcgtaatctgtaattgcttgttaatcaataaaccgtttaattcgtttcagttgaactgcggcc

SEQ ID NO: 577 - DNA, 2580 bp, Artificial Sequence
  Description of Artificial Sequence: Synthetic polynucleotide
ccatcgacgtcagacgcggaagcttcgatcaactacgcggacaggtaccaaaacaaatgttctcgtcacgtgggcatgaatctgatgctgtttccctgcagacaatgcgagagactgaatcagaattcaaatatctgcttcactcacggtgtcaaagactgtttagagtgctttcccgtgtcagaatctcaacccgtttctgtcgtcaaaaaggcgtatcagaaactgtgctacattcatcacatcatgggaaaggtgccagacgcttgcactgcttgcgacctggtcaatgtggacttggatgactgtgtttctgaacaataaatgacttaaaccaggtatggctgccgatggttatcttccagattggctcgaggacaaccttagtgaaggaattcgcgagtggtgggctttgaaacctggagcccctcaacccaaggcaaatcaacaacatcaagacaacgctcgaggtcttgtgcttccgggttacaaataccttggacccggcaacggactcgacaagggggagccggtcaacgcagcagacgcggcggccctcgagcacgacaaggcctacgaccagcagctcaaggccggagacaacccgtacctcaagtacaaccacgccgacgccgagttccaggagcggctcaaagaagatacgtcttttgggggcaacctcgggcgagcagtcttccaggccaaaaagaggcttcttgaacctcttggtctggttgaggaagcggctaagacggctcctggaaagaagaggcctgtagagcagtctcctcgggaaccggactcctccgcgggtattggcaaatcgggtgcacagcccgctaaaaagagactcaatttcggtcagactggcgacacagagtcagtcccagaccctcaaccaatcggagaacctcccgcagccccctcaggtgtgggatctcttacaatggcttcaggtggtggcgcaccagtggcagacaataacgaaggtgccgatggagtgggtagttcctcgggaaattggcattgcgattcccaatggctgggggacagagtcatcaccaccagcacccgaacctgggccctgcccacctacaacaatcacctctacaagcaaatctccaacagcacatctggaggatcttcaaatgacaacgcctacttcggctacagcaccccctgggggtattttgacttcaacagattccactgccacttctcaccacgtgactggcagcgactcatcaacaacaactggggattccggcctaagcgactcaacttcaagctcttcaacattcaggtcaaagaggttacggacaacaatggagtcaagaccatcgccaataaccttaccagcacggtccaggtcttcacggactcagactatcagctcccgtacgtgctcgggtcggctcacgagggctgcctcccgccgttcccagcggacgttttcatgattcctcagtacgggtatctgacgcttaatgatggaagccaggccgtgggtcgttcgtccttttactgcctggaatatttcccgtcgcaaatgctaagaacgggtaacaacttccagttcagctacgagtttgagaacgtacctttccatagcagctacgctcacagccaaagcctggaccgactaatgaatccactcatcgaccaatacttgtactatctctcaaagactattaacggttctggacagaatcaacaaacgctaaaattcagtgtggccggacccagcaacatggctgtccagggaagaaactacatacctggacccagctaccgacaacaacgtgtctcaaccactgtgactcaaaacaacaacagcgaatttgcttggcctggagcttcttcttgggctctcaatggacgtaatagcttgatgaatcctggacctgctatggccagccacaaagaaggagaggaccgtttctttcctttgtctggatctttaatttttggcaaacaaggaactggaagagacaacgtggatgcggacaaagtcatgataaccaacgaagaagaaattaaaactactaacccggtagcaacggagtcctatggacaagtggccacaaaccaccagagtgcccaagcacaggcgcagaccggctgggttcaaaaccaaggaatacttccgggtatggtttggcaggacagagatgtgtacctgcaaggacccatttgggccaaaattcctcacacggacggcaactttcacccttctccgctgatgggagggtttggaatgaagcacccgcctcctcagatcctcatcaaaaacacacctgtacctgcggatcctccaacggccttcaacaaggacaagctgaactctttcatcacccagtattctactggccaagtcagcgtggagatcgagtgggaactgcagaaggaaaacagcaagcgctggaacccggagatccagtacacttccaactattacaagtctaataatgttgaatttgctgttaatactgaaggtgtatatagtgaaccccgccccattggcaccagatacctgactcgtaatctgtaattgcttgttaatcaataaaccgtttaatt

SEQ ID NO: 578 - DNA, 2601 bp, Artificial Sequence
  Description of Artificial Sequence: Synthetic polynucleotide
ccatcgacgtcagacgcggaagcttcgatcaactacgcggacaggtaccaaaacaaatgttctcgtcacgtgggcatgaatctgatgctgtttccctgcagacaatgcgagagactgaatcagaattcaaatatctgcttcactcacggtgtcaaagactgtttagagtgctttcccgtgtcagaatctcaacccgtttctgtcgtcaaaaaggcgtatcagaaactgtgctacattcatcacatcatgggaaaggtgccagacgcttgcactgcttgcgacctggtcaatgtggacttggatgactgtgtttctgaacaataaatgacttaaaccaggtatggctgccgatggttatcttccagattggctcgaggacaaccttagtgaaggaattcgcgagtggtgggctttgaaacctggagcccctcaacccaaggcaaatcaacaacatcaagacaacgctcgaggtcttgtgcttccgggttacaaataccttggacccggcaacggactcgacaagggggagccggtcaacgcagcagacgcggcggccctcgagcacgacaaggcctacgaccagcagctcaaggccggagacaacccgtacctcaagtacaaccacgccgacgccgagttccaggagcggctcaaagaagatacgtcttttgggggcaacctcgggcgagcagtctttcaggccaaaaagaggcttcttgaacctcttggtctggttgaggaagcggctaagacggctcctggaaagaagaggcctgtagagcagtctcctcaggaaccggactcctccgcgggtattggcaaatcgggtgcacagcccgctaaaaagagactcaatttcggtcagactggcgacacagagtcagtcccagaccctcaaccaatcggagaacctcccgcagccccctcaggtgtgggatctcttacaatggcttcatgtggtggcgcaccagtggcagacaataacgaaggtgccgatggagtgggtagttcctcgggaaattggcattgcgattcccaatggctgggggacagagtcatcaccaccagcacccgaacctgggccctgcccacctacaacaatcacctctacaagcaaatctccaacagcacatctggaggatcttcaaatgacaacgcctacttcggctacagcaccccctgggggtattttgacttcaacagattccactgccacttctcaccacgtgactggcagcgactcatcaacaacaactggggattccggcctaagcgactcaacttcaagctcttcaacattcaggtcaaagaggttacggacaacaatggagtcaagaccatcgccaataaccttaccagcacggtccaggtcttcacggactcagactatcagctcccgtacgtgctcgggtcggctcacgagggctgcctcccgccgttcccagcggacgttttcatgattcctcagtacgggtatctgacgcttaatgatggaagccaggccgtgggtcgttcgtccttttactgcctggaatatttcccgtcgcaaatgctaagaacgggtaacaacttccagttcagctacgagtttgagaacgtacctttccatagcagctacgctcacagccaaagcctggaccgactaatgaatccactcatcgaccaatacttgtactatctctcaaagactattaacggttctggacagaatcaacaaacgctaaaattcagtgtggccggacccagcaacatggctgtccagggaagaaactacatacctggacccagctaccgacaacaacgtgtctcaaccactgtgactcaaaacaacaacagcgaatttgcttggcctggagcttcttcttgggctctcaatggacgtaatagcttgatgaatcctggacctgctatggccagccacaaagaaggagaggaccgtttctttcctttgtctggatctttaatttttggcaaacaaggaactggaagagacaacgtggatgcggacaaagtcatgataaccaacgaagaagaaattaaaactactaacccggtagcaacggagtcctatggacaagtggccacaaaccaccagagtgcccaagcacaggcgcagaccggctgggttcaaaaccaaggaatacttccgggtatggtttggcaggacagagatgtgtacctgcaaggacccatttgggccaaaattcctcacacggacggcaactttcacccttctccgctgatgggagggtttggaatgaagcacccgcctcctcagatcctcatcaaaaacacacctgtacctgcggatcctccaacggccttcaacaaggacaagctgaactctttcatcacccagtattctactggccaagtcagcgtggagatcgagtgggagctgcagaaggaaaacagcaagcgctggaacccggagatccagtacacttccaactattacaagtctaataatgttgaatttgctgttaatactgaaggtgtatatagtgaaccccgccccattggcaccagatacctgactcgtaatctgtaattgcttgttaatcaataaaccgtttaattcgtttcagttgaactgcggcc

SEQ ID NO: 579 - DNA, 2601 bp, Artificial Sequence
  Description of Artificial Sequence: Synthetic polynucleotide
ccatcgacgtcagacgcggaagcttcgatcaactacgcggacaggtaccaaaacaaatgttctcgtcacgtgggcatgaatctgatgctgtttccctgcagacaatgcgagagactgaatcagaattcaaatatctgcttcactcacggtgtcaaagactgtttagagtgctttcccgtgtcagaatctcaacccgtttctgtcgtcaaaaaggcgtatcagaaactgtgctacattcatcacatcatgggaaaggtgccagacgcttgcactgcttgcgacctggtcaatgtggacttggatgactgtgtttctgaacaataaatgacttaaaccaggtatggctgccgatggttatcttccagattggctcgaggacaaccttagtgaaggaattcgcgagtggtgggctttgaaacctggagcccctcaacccaaggcaaatcaacaacatcaagacaacgctcgaggtcttgtgcttccgggttacaaataccttggacccggcaacggactcgacaagggggagccgatcaacgcagcagacgcggcggccctcgagcacgacaaggcctacgaccagcagctcaaggccggagacaacccgtacctcaagtacaaccacgccgacgccgagttccaggagcggctcaaagaagatacgtcttttgggggcaacctcgggcgagcagtcttccaggccaaaaagaggcttcttgaacctcttggtctggttgaggaagcggctaagacggctcctggaaagaagaggcctgtagagcagtctcctcaggaaccggactcctccgcgggtattggcaaatcgggtgcacagcccgctaaaaagagactcaatttcggtcagactggcgacacagagtcagtcccagaccctcaaccaatcggagaacctcccgcagccccctcaggtgtgggatctcttacaatggcttcaggtggtggcgcaccagtggcagacaataacgaaggtgccgatggagtgggtagttcctcgggaaattggcattgcgattcccaatggctgggggacagagtcatcaccaccagcacccgaacctgggccctgcccacctacaacaatcacctctacaagcaaatctccaacagcacatctggaggatcttcaaatgacaacgcctacttcggctacagcaccccctgggggtattttgacttcaacagattccactgccacttctcaccacgtgactggcagcgactcatcaacaacaactggggattccggcctaagcgactcaacttcaagctcttcaacattcaggtcaaagaggttacggacaacaatggagtcaagaccatcgccaataaccttaccagcacggtccaggtcttcacggactcagactatcagctcccgtacgtgctcgggtcggctcacgagggctgcctcccgccgttcccagcggacgttttcatgattcctcagtacgggtatctgacgcttaatgatggaagccaggccgtgggtcgttcgtccttttactgcctggaatatttcccgtcgcaaatgctaagaacgggtaacaacttccagttcagctacgagtttgagaacgtacctttccatagcagctacgctcacagccaaagcctggaccgactaatgaatccactcatcgaccaatacttgtactatctctcaaagactattaacggttctggacagaatcaacaaacgctaaaattcagtgtggccggacccagcaacatggctgtccagggaagaaactacatacctggacccagctaccgacaacaacgtgtctcaaccactgtgactcaaaacaacaacagcgaatttgcttggcctggagcttcttcttgggctctcaatggacgtaatagcttgatgaatcctggacctgctatggccagccacaaagaaggagaggaccgtttctttcctttgtctggatctttaatttttggcaaacaaggaactggaagagacaacgtggatgcggacaaagtcatgataaccaacgaagaagaaattaaaactactaacccggtagcaacggagtcctatggacaagtggccacaaaccaccagagtgcccaagcacaggcgcagaccggctgggttcaaaaccaaggaatacttccgggtatggtttggcaggacagagatgtgtacctgcaaggacccatttgggccaaaattcctcacacgtacggcaactttcacccttctccgctgatgggagggtttggaatgaagcacccgcctcctcagatcctcatcaaaaacacacctgtacctgcggatcctccaacggccttcaacaaggacaagctgaactctttcatcacccagtattctactggccaagtcagcgtggagatcgagtgggagctgcagaaggaaaacagcaagcgctggaacccggagatccagtacacttccaactattacaagtctaataatgttgaatttgctgttaatactgaaggtgtatatagtgaaccccgccccattggcaccagatacctgactcgtaatctgtaattgcttgttaatcaataaaccgtttaattcgtttcagttgaactgcggcc

SEQ ID NO: 580 - DNA, 2601 bp, Artificial Sequence
  Description of Artificial Sequence: Synthetic polynucleotide
ccatcgacgtcagacgcggaagcttcgatcaactacgcggacaggtaccaaaacaaatgttctcgccacgtgggcatgaatctgatgctgtttccctgcagacaatgcgagagactgaatcagaattcaaatatctgcttcactcacggtgtcaaagactgtttagagtgctttcccgtgtcagaatctcaacccgtttctgtcgtcaaaaaggcgtatcagaaactgtgctacattcatcacatcatgggaaaggtgccagacgcttgcactgcttgcgacctggtcaatgtggacttggatgactgtgtttctgaacaataaatgacttaaaccaggtatggctgccgatggttatcttccagattggctcgaggacaaccttagtgaaggaattcgcgagtggtgggctttgaaacctggagcccctcaacccaaggcaaatcaacaacatcaagacaacgctcgaggtcttgtgcttccgggttacaaataccttggacccggcaacggactcgacaagggggagccggtcaacgcagcagacgcggcggccctcgagcacgacaaggcctacgaccagcagctcaaggccggagacaacccgtacctcaagtacaaccacgccgacgccgagttccaggagcggctcaaagaagatacgtcttttgggggcaacctcgggcgagcagtcttccaggccaaaaagaggcttcttgaacctcttggtctggttgaggaagcggctaagacggctcctggaaagaagaggcctgtagagcagtctcctcaggaaccggactcctccgcgggtattggcaaatcgggtgcacagcccgctaaaaagagactcaatttcggtcagactggcgacacagagtcagtcccagaccctcaaccaatcggagaacctcccgctgccccctcaggtgtgggatctcttacaatggcttcaggtggtggcgcaccagtggcagacaataacgaaggtgccgatggagtgggtagttcctcgggaaattggcattgcgattcccaatggctgggggacagagtcatcaccaccagcacccgaacctgggccctgcccacctacaacaatcacctctacaagcaaatctccaacagcacatctggaggatcttcaaatgacaacgcctacttcggctacagcaccccctgggggtattttgacttcaacagattccactgccacttctcaccacatgactggcagcgactcatcaacaacaactggggattccggcctaagcgactcaacttcaagctcttcaacattcaggtcaaagaggttacggacaacaatggagtcaagaccatcgccaataaccttaccagcacggtccaggtcttcacggactcagactatcagctcccgtacgtgctcgggtcggctcacgagggctgcctcccgccgttcccagcggacgttttcatgattcctcagtacgggtatctgacgcttaatgatggaagccaggccgtgggtcgttcgtccttttactgcctggaatatttcccgtcgcaaatgctaagaacgggtaacaacttccagttcagctacgagtttgagaacgtacctttccatagcagctacgctcacagccaaagcctggaccgactaatgaatccactcatcgaccaatacttgtactatctctcaaagactattaacggttctggacagaatcaacaaacgctaaaattcaatgtggccggacccagcaacatggctgtccagggaagaaactacatacctggacccagctaccgacaacaacgtgtctcaaccactgtgactcaaaacaacaacagcgaatttgcctggcctagagcttcttcttgggctctcaatggacgtaatagcttgatgaatcctggacctgctatggccagccacaaagaaggagaggaccgtttctttcctttgtctggatctttaatttttggcaaacaaggaactggaagagacaacgtggatgcggacaaagtcatgataaccaacgaagaagaaattaaaactactaacccggtagcaacggagtcctatggacaagtggccacaaaccaccagagtgcccaagcacaggcgcagaccggctgggttcaaaaccaaggaatacttccgggtatggtttggcaggacagagatgtgtacctgcaaggacccatttgggccaaaattcctcacacggacggcaactttcacccttctccgctgatgggagggtttggaatgaagcacccgcctcctcagatcctcatcaaaaacacacctgtacctgcggatcctccaacggccttcaacaaggacaagctgaactctttcatcacccagtattctactggccaagtcagcatggagatcgagtgggagctgcagaaggaaaacagcaagcgctggaacccggagatccagtacacttccaactattacaagtctaataatgttgaatttgctgttaatactgaaggtgtatatagtgaaccccgccccattggcaccagatacctgactcgtaatctgtaattgcttgttaatcaataaaccgtttaattcgtttcagttgaactgcggcc

SEQ ID NO: 581 - DNA, 2601 bp, Artificial Sequence
  Description of Artificial Sequence: Synthetic polynucleotide
ccatcgacgtcagacgcggaagcttcgatcaactacgcggacaggtaccaaaacaaatgttctcgtcacgtgggcatgaatctgatgctgtttccctgcagacaatgcgagagactgaatcagaattcaaatatctgcttcactcacggtgtcaaagactgtttagagtgctttcccgtgtcagaatctcaacccgtttctgtcgtcaaaaaggcgtatcagaaactgtgctacattcatcacatcatgggaaaggtgccagacgcttgcactgcttgcgacctggtcaatgtggacttggatgactgtgtttctgaacaataaatgacttaaaccaggtatggctgccgatggttatcttccagattggctcgaggacaaccttagtgaaggaattcgcgagtggtgggctttgaaacctggagcccctcaacccaaggcaaatcaacaacatcaagacaacgctcgaggtcttgtgcttccgggttacaaataccttggacccggcaacggactcgacaagggggagccggtcaacgcagcagacgcggcggccctcgagcacgacaaggcctacgaccagcagctcaaggccggagacaacccgtacctcaagtacaaccacgccgacgccgagttccaggagcggctcaaagaagatacgtcttttgggggcaacctcgggcgagcagtcttccaggccaaaaagaggcttcttgaacctcttggtctggttgaggaagcggctaagacggctcctggaaagaagaggcctgtagagcagtctcctcaggaaccggactcctccgcgggtattggcaaatcgggtgcacagcccgctaaaaagagactcaatttcggtcagactggcgacacagagtcagtcccagaccctcaaccaatcggagaacctcccgcagccccctcaggtgtgggatctcttacaatggcttcaggtggtggcgcaccagtggcagacaataacgaaggtgccgatggagtgggtagttcctcgggaaattggcattgcgattcccaatggctgggggacagagtcatcaccaccagcacccgaacctgggccctgcccacctacaacaatcacctctacaagcaaatctccaacagcacatctggaggatcttcaaatgacaacgcctacttcggctacagcaccccctgggggtattttgacttcaacagattccactgccacttctcaccacgtgactggcagcgactcatcaacaacaactggggattccggcctaagcgactcaacttcaagctcttcaacattcaggtcaaagaggttacggacaacaatggagtcaagaccatcgccaataaccttaccagcacggtccaggtcttcacggactcagactatcagctcccgtacgtgctcgggtcggctcacgagggctgcctcccgccgttcccagcggacgttttcatgattcctcagtacgggtatctgacgcttaatgatggaagccaggccgtgggtcgttcgtccttttactgcctggaatatttcccgtcgcaaatgctaagaacgggtaacaacttccagttcagctacgagtttgagaacgtacctttccatagcagctacgctcacagccaaagcctggaccgactaatgaatccactcatcgaccaatacttgtactatctctcaaagactattaacggttctggacagaatcaacaaacgctaaaattcagtgtggccggacccagcaacatggctgtccagggaagaaactacatacctggacccagctaccgacaacaacgtgtctcaaccactgtgactcaaaacaacaacagcgaatttgcttggcctagagcttcttcttgggctctcaatggacgtaatagcttgatgaatcctggacctgctatggccagccacaaagaaggagaggaccgtttctttcctttgtctggatctttaatttttggcaaacaaggaactggaagagacaacgtggatgcggacaaagtcatgataaccaacgaagaagaaattaaaactactaacccggtagcaacggagtcctatggacaagtggccacaaaccaccagagtgcccaagcacaggcgcagaccggctgggttcaaaaccaaggaatacttccgggtatggtttggcaggacagagatgtgtacctgcaaggacccatttgggccaaaattcctcacacggacggcaactttcacccttctccgctgatgggagggtttggaatgaagcacccgcctcctcagatcctcatcaaaaacacacctgtacctgcggatcctccaacggccttcaacaaggacaagctgaactctttcatcacccagtattctactggccaagtcagcgtggagatcgagtgggagctgcagaaggaaaacagcaagcgctggaacccggagatccagtacacttccaactattacaagtctaataatgttgaatttgctgttaatactgaaggtgtatatagtgaaccccgccccattggcaccagatacctgactcgtaatctgtaattgcttgttaatcaataaaccgtttaattcgtttcagttgaactgcggcc

SEQ ID NO: 582 - DNA, 2601 bp, Artificial Sequence
  Description of Artificial Sequence: Synthetic polynucleotide
ccatcgacgtcagacgcggaagcttcgatcaactacgcggacaggtaccaaaacaaatgttctcgtcacgtgggcatgaatctgatgctgtttccctgcagacaatgcgagagactgaatcagaattcaaatatctgcttcactcacggtgtcaaagactgtttagagtgctttcccgtgtcagaatctcaacccgtttctgtcgtcaaaaaggcgtatcagaaactgtgctacattcatcacatcatgggaaaggtgccagacgcttgcactgcttgcgacctggtcaatgtggacttggatgactgtgtttctgaacaataaatgacttaaaccaggtatggctgccgatggttatcttccagattggctcgaggacaaccttagtgaaggaattcgcgagtggtgggctttgaaacctggagcccctcaacccaaggcaaatcaacaacatcaagacaacgctcgaggtcttgtgcttccgggttacaaataccttggacccggcaacggactcgacaagggggagccggtcaacgcagcagacgcggcggccctcgagcacgacaaggcctacgaccagcagctcaaggccggagacaacccgtacctcaagtacaaccacgccgacgccgagttccaggagcggctcaaagaagatacgtcttttgggggcaacctcgggcgagcagtcttccaggccaaaaagaggcttcttgaacctcttggtctggttgaggaagcggctaagacggctcctggaaagaagaggcctgtagagcagtctcctcaggaaccggactcctccgcgggtattggcaaatcgggtgcacagcccgctaaaaagagactcaatttcggtcagactggcgacacagagtcagtcccagaccctcaaccaatcggagaacctcccgcagccccctcaggtgtgggatctcttacaatggcttcaggtggtggcgcaccagtggcagacaataacgaaggtgccgatggagtgggtagttcctcgggaaattggcattgcgattcccaatggctgggggacagagtcatcaccaccagcacccgaacctgggccctgcccacctacaacaatcacctctacaagcaaatctccaacagcacatctggaggatcttcaaatgacaacgcctacttcggctacagcaccccctgggggtattttgacttcaacagattccactgccacttctcaccacgtgactggcagcgactcatcaacaacaactggggattccggcctaagcgactcaacttcaagctcttcaacattcaggtcaaagaggttacggacaacaatggagtcaagaccatcgccaataaccttaccagcacggtccaggtcttcacggactcagactatcagctcccgtacgtgctcgggtcggctcacgagggctgcctcccgccgttcccagcggacgttttcatgattcctcagtacgggtatctgacgcttaatgatggaagccaggccgtgggtcgttcgtccttttactgcctggaatatttcccgtcgcaaatgctaagaacgggtaacaacttccagttcagctacgagtttgagaacgtacctttccatagcagctacgctcacagccaaagcctggaccgactaatgaatccactcatcgaccaatacttgtactatctctcaaagactattaacggttctggacagaatcaacaaacgctaaaattcagtgtggccggacccagcaacatggctgtccagggaagaaactacatacctggacccagctaccgacaacaacgtgtctcaaccactgtgactcaaaacaacaacagcgaatttgcttggcctagagcttcttcttgggctctcaatggacgtaatagcttgatgaatcctggacctgctatggccagccacaaagaaggagaggaccgtttctttcctttgtctggatctttaatttttggcaaacaaggaactggaagagacaacgtggatgcggacaaagtcatgataaccaacgaagaagaaattaaaactactaacccggtagcaacggagtcctatggacaagtggccacaaaccaccagagtgcccaagcacaggcgcagaccggctgggttcaaaaccaaggaatacttccgggtatggtttggcaggacagagatgtgtacctgcaaggacccatttgggccaaaattcctcacacggacggcaactttcacccttctccgctgatgggagggtttggaatgaagcacccgcctcctcagatcctcatcaaaaacacacctgtacctgcggatcctccaacggccttcaacaaggacaagctgaactctttcatcacccagtattctactggccaagtcagcgtggagatcgagtgggagcggcagaaggaaaacagcaagcgctggaacccggagatccagtacacttccaactattacaagtctaataatgttgaatttgctgttaatactgaaggtgtatatagtgaaccccgccccattggcaccagatacctgactcgtaatctgtaattgcttgttaatcaataaaccgtttaattcgtttcagttgaactgcggcc

SEQ ID NO: 583 - DNA, 2601 bp, Artificial Sequence
  Description of Artificial Sequence: Synthetic polynucleotide
ccatcgacgtcagacgcggaagcttcgatcaactacgcggacaggtaccaaaacaaatgttctcgtcacgtgggcatgaatctgatgctgtttccctgcagacaatgcgagagactgaatcagaattcaaatatctgcttcactcacggtgtcaaagactgtttagagtgctttcccgtgtcagaatctcaacccgtttctgtcgtcaaaaaggcgtatcagaaactgtgctacattcatcacatcatgggaaaggtgccagacgcttgcactgcttgcgacctggtcaatgtggacttggatgactgtgtttctgaacaataaatgacttaaaccaggtatggctgccgatggttatcttccagattggctcgaggacaaccttagtgaaggaattcgcgagtggtgggctttgaaacctggagcccctcaacccaaggcaaatcaacaacatcaagacaacgctcgaggtcttgtgcttccgggttacaaataccttggacccggcaacggactcgacaagggggagccggtcaacgcagcagacgcggcggccctcgagcacgacaaggcctacgaccagcagctcaaggccggagacaacccgtacctcaagtacaaccacgccgacgccgagttccaggagcggctcaaagaagatacgtcttttgggggcaacctcgggcgagcagtcttccaggccaaaaagaggcttcttgaacctcttggtctggttgaggaagcggctaagacggctcctggaaagaagaggcctgtagagcagtctcctcaggaaccggactcctccgcgggtattggcaaatcgggtgcacagcccgctaaaaagagactcaatttcggtcagactggcgacacagagtcagtcccagaccctcaaccaatcggagaacctcccgcagccccctcaggtgtgggatctcttacaatggcttcaggtggtggcgcaccagtggcagacaataacgaaggtgccgatggagtgggtagttcctcgggaaattggcattgcgattcccaatggctgggggacagagtcatcaccaccagcacccgaacctgggccctgcccacctacaacaatcacctctacaagcaaatctccaacagcacatctggaggatcttcaaatgacaacgcctacttcggctacagcaccccctgggggtattttgacttcaacagattccactgccacttctcaccacgtgactggcagcgactcatcaacaacaactggggattccggcctaagcgactcaacttcaagctcttcaacattcaggtcaaagaggttacggacaacaatggagtcaagaccatcgccaataaccttaccagcacggtccaggtcttcgcggactcagactatcagctcccgtacgtgctcgggtcggctcacgagggctgcctcccgccgttcccagcggacgttttcatgattcctcagtacgggtatctgacgcttaatgatggaagccaggccgtgggtcgttcgtccttttactgcctggaatatttcccgtcgcaaatgctaagaacgggtaacaacttccagttcagctacgagtttgagaacgtacctttccatagcagctacgctcacagccaaagcctggaccgactaatgaatccactcatcgaccaatacttgtactatctctcaaagactattaacggttctggacagaatcaacaaacgctaaaattcagtgtggccggacccagcaacatggctgtccagggaagaaactacatacctggacccagctaccgacaacaacgtgtctcaaccactgtgactcaaaacaacaacagcgaatttgcttggcctagagcttcttcttgggctctcaatggacgtaatagcttgatgaatcctggacctgctatggccagccacaaagaaggagaggaccgtttctttcctttgtctggatctttaatttttggcaaacaaggaactggaagagacaacgtggatgcggacaaagtcatgataaccaacgaagaagaaattaaaactactaacccggtagcaacggagtcctatggacaagtggccacaaaccaccagagtgcccaagcacaggcgcagaccggctgggttcaaaaccaaggaatacttccgggtatggtttggcaggacagagatgtgtacctgcaaggacccatttgggccaaaattcctcacacggacggcaactttcacccttctccgctgatgggagggtttggaatgaagcacccgcctcctcagatcctcatcaaaaacacacctgtacctgcggatcctccaacggccttcaacaaggacaagctgaactctttcatcacccagtattctactggccaagtcagcgtggagatcgagtgggagctgcagaaggaaaacagcaagcgctggaacccggagatccagtacacttccaactattacaagtctaataatgttgaatttgctgttaatactgaaggtgtatatagtgaaccccgccccattggcaccagatacctgactcgtaatctgtaattgcttgttaatcaataaaccgtttaattcgtttcagttgaactgcggcc

SEQ ID NO: 584 - DNA, 2601 bp, Artificial Sequence
  Description of Artificial Sequence: Synthetic polynucleotide
ccatcgacgtcagacgcggaagcttcgatcaactacgcggacaggtaccaaaacaaatgttctcgtcacgtgggcatgaatctgatgctgtttccctgcagacaatgcgagagactgaatcagaattcaaatatctgcttcactcacggtgtcaaagactgtttagagtgctttcccgtgtcagaatctcaacccgtttctgtcgtcaaaaaggcgtatcagaaactgtgctacattcatcacatcatgggaaaggtgccagacgcttgcactgcttgcgacctggtcaatgtggacttggatgactgtgtttctgaacaataaatgacttaaaccaggtatggctgccgatggttatcttccagattggctcgaggacaaccttagtgaaggaattcgcgagtggtgggctttgaaacctggagcccctcaacccaaggcaaatcaacaacatcaagacaacgctcgaggtcttgtgcttccgggttacaaataccttggacccggcaacggactcgacaagggggagccggtcaacgcagcagacgcggcggccctcgagcacgacaaggcctacgaccagcagctcaaggccggagacaacccgtacctcaagtacaaccacgccgacgccgagttccaggagcggctcaaagaagatacgtcttttgggggcaacctcgggcgagcagtcttccaggccaaaaagaggcttcttgaacctcttggtctggttgaggaagcggctaagacggctcctggaaagaagaggcctgtagagcagtctcctcaggaaccggactcctccgcgggtattggcaaatcgggtgcacagcccgctaaaaagagactcaatttcggtcagactggcgacacagagtcagtcccagaccctcaaccaatcggagaacctcccgcagccccctcaggtgtgggatctcttacaatggcttcaggtggtggcgcaccagtggcagacaataacgaaggtgccgatggagtgggtagttcctcgggaaattggcattgcgattcccaatggctgggggacagagtcatcaccaccagcacccgaacctgggccctgcccacctacaacaatcacctctacaagcaaatctccaacagcacatctggaggatcttcaaatgacaacgcctacttcggctacagcaccccctgggggtattttgacttcaacagattccactgccacttctcaccacgtgactggcagcgactcatcaacaacaactggggattccggcctaagcgactcaacttcaagctcttcaacattcaggtcaaagaggttacggacaacaatggagtcaagaccatcgccaataaccttaccagcacggtccaggtcttcacggactcagactatcagctcccgtacgtgctcgggtcggctcacgagggctgcctcccgccgttcccagcggacgttttcatgattcctcagtacgggtatctgacgcttaatgatggaagccaggccgtgggtcgttcgtccttttactgcctggaatatttcccgtcgcaaatgctaagaacgggtaacaacttccagttcagctacgagtttgagaacgtacctttccatagcagctacgctcacagccaaagcctggaccgactaatgaatccactcatcgaccaatacttgtactatctctcaaagactattaacggttctggacagaatcaacaaacgctaaaattcagtgtggccggacccagcaacatggctgtccagggaagaaactacatacctggacccagctaccgacaacaacgtgtctcaaccactgtgactcaaaacaacaacagcgaaattgcttggcctagagcttcttcttgggctctcaatggacgtaatagcttgatgaatcctggacctgctatggccagccacaaagaaggagaggaccgtttctttcctttgtctggatctttaatttttggcaaacaaggaactggaagagacaacgtggatgcggacaaagtcatgataaccaacgaagaagaaattaaaactactaacccagtagcaacggagtcctatggacaagtggccacaaaccaccagagtgcccaagcacaggcgcagaccggctgggttcaaaaccaaggaatacttccgggtatggtttggcaggacagagatgtgtacctgcaaggacccatttgggccaaaattcctcacacggacggcaactttcacccttctccgctgatgggagggtttggaatgaagcacccgcctcctcagatcctcatcaaaaacacacctgtacctgcggatcctccaacggccttcaacaaggacaagctgaactctttcatcacccagtattctactggccaagtcagcgtggagatcgagtgggagctgcagaaggaaaacagcaagcgctggaacccggagatccagtacacttccaactattgcaagtctaataatgttgaatttgctgttaatactgaaggtgtatatagtgaaccccgccccattggcaccagatacctgactcgtaatctgtaattgcttgttaatcaataaaccgtttaattcgtttcagttgaactgcggcc

SEQ ID NO: 585 - DNA, 2601 bp, Artificial Sequence
  Description of Artificial Sequence: Synthetic polynucleotide
ccatcgacgtcagacgcggaagcttcgatcaactacgcggacaggtaccaaaacaaatgttctcgtcacgtgggcatgaatctgatgctgtttccctgcagacaatgcgagagactgaatcagaattcaaatatctgcttcactcacggtgtcaaagactgtttagagtgctttcccgtgtcagaatctcaacccgtttctgtcgtcaaaaaggcgtatcagaaactgtgctacattcatcacatcatgggaaaggtgccagacgcttgcactgcttgcgacctggtcaatgtggacttggatgtctgtgtttctgaacaataaatgacttaaaccaggtatggctgccgatggttatcttccagattggctcgaggacaaccttagtgaaggaattcgcgagtggtgggctttgaaacctggagcccctcaacccaaggcaaatcaacaacatcaagacaacgctcgaggtcttgtgcttccgggttacaaataccttggacccggcaacggactcgataagggggagccggtcaacgcagcagacgcggcggccctcgagcacgacaaggcctacgaccagcagctcaaggccggagacaacccgtacctcaagtacaaccacgccgacgccgagttccaggagcggctcaaagaagatacgtcttttgggggcaacctcgggcgagcagtcttccaggccaaaaagaggcttcttgaacctcttggtctggttgaggaagcggctaagacggctcctggaaagaagaggcctgtagagcagtctcctcaggaaccggactcctccgcgggtattggcaaatcgggtgcacagcccgctaaaaagagactcaatttcggtcagactggcgacacagagtcagtcccagaccctcaaccaatcggagaacctcccgcagccccctcaggtgtgggatctcttacaatggcttcaggtggtggcgcaccagtggcagacaataacgaaggtgccgatggagtgggtagttcctcgggaaattggcattgcgattcccaatggctgggggacagagtcatcaccaccagcacccgaacctgggccctgcccacctacaacaatcacctctacaagcaaatctccaacagcacatctggaggatcttcaaatgacaacgcctacttcggctacagcaccccctgggggtattttgacttcaacagattccactgccacttctcaccacgtgactggcagcgactcatcaacaacaactggggattccggcctaagcgactcaacttcaagctcttcaacattcaggtcaaagaggttacggacaacaatggagtcaagaccatcgccaataaccttaccagcacggtccaggtcttcacggactcagactatcagctcccgtacgtgctcgggtcggctcacgagggctgcctcccgccgttcccagcggacgttttcatgattcctcagtacgggtatctgacgcttaatgatggaagccaggccgtgggtcgttcgtccttttactgcctggaatatttcccgtcgcaaatgctaagaacgggtaacaacttccagttcagctacgagtttgagaacgtacctttccatagcagctacgctcacagccaaagcctggaccgactaatgaatccactcatcgaccaatacttgtactatctctcaaagactattaacggttctggacagaatcaacaaacgctaaaattcagtgtggccggacccagcaacatggctgtccagggaagaaactacatacctggacccagctaccgacaacaacgtgtctcaaccactgtgactcaaaacaacaacagcgaatttgcttggcctagagcttcttcttgggctctcaatggacgtaatagcttgatgaatcctggacctgctatggccagccacaaagaaggagaggaccgtttctttcctttgtctggatctttaatttttggcaaacaaggaactggaagagacaacgtggatgcggacaaagtcatgataaccaacgaagaagaaattaaaactactaacccggtagcaacggagtcctatggacaagtggccacaaaccaccagagtgcccaagcacaggcgcagaccggctgggttcaaaaccaaggaatacttccgggtatggtttggcaggacagagatgtgtacctgcaaggacccatttgggccaaaattcctcacacggacggcaactttcacccttctccgctgatgggagggtttggaatgaagcacccgcctcctcagatcctcatcaaaaacacacctgtacctgcggatcctccaacggccttcaacaaggacaagctgaactctttcatcacccagtattctactggccaagtcagcgtggagatcgagtgggagctgcagaaggaaaacagcaagcgctggaacccggagatccagtacacttccaactattacaagtctaataatgttgaatttgctgttaatactgaaggtgtatatagtgaaccccgccccattggcaccagatacctgactcgtaatctgtaattgcttgttaatcaataaaccgtttaattcgtttcagttgaactgcggcc

SEQ ID NO: 586 - protein, 736 aa, Artificial Sequence
  Description of Artificial Sequence: Synthetic polypeptide
MTADGYLPDWLEDNLSEGIREWWALKPGAPQPKANQQHQDNARGLVLPGYKYLGPGNGLDKGEPVNAADAAALEHDKAYDQQLKAGDNPYLKYNHADAEFQERLKEDTSFGGNLGRAVFQAKKRLLEPLGLVEEAAKTAPGKKRPVEQSPQEPDSSAGIGKSGAQPAKKRLNFGQTGDTESVPDPQPIGEPPAAPSGVGSLTMASGGGAPVADNNEGADGVGSSSGNWHCDSQWLGDRVITTSTRTWALPTYNNHLYKQISNSTSGGSSNDNAYFGYSTPWGYFDFNRFHCHFSPRDWQRLINNNWGFRPKQLNFKLFNIQVKEVTDNNGVKTIANNLTSTVQVFTDSDYQLPYVLGSAHEGCLPPFPADVFMIPQYGYLTLNDGSQAVGRSSFYCLEYFPSQMLRTGNNFQFSYEFENVPFHSSYAHSQSLDRLMNPLIDQYLYYLSKTINGSGQNQQTLKFSVAGPSNMAVQGRNYIPGPSYRQQRVSTTVTQNNNSEFAWPGASSWALNGRNSLMNPGPAMASHKEGEDRFFPLSGSLIFGKQGTGRDNVDADKVMITNEEEIKTTNPVATESYGQVATNHQSAQAQAQTGWVQNQGILPGMVWQDRDVYLQGPIWAKIPHTDGNFHPSPLMGGFGMKHPPPQILIKNTPVPADPPTAFNKDKLNSFITQYSTGQVSVEIEWELQKENSKRWNPEIQYTSNYYKSNNVEFAVNTEGVYSEPRPIGTRYLTRNL

SEQ ID NO: 587 - protein, 736 aa, Artificial Sequence
  Description of Artificial Sequence: Synthetic polypeptide
MAADGYLPDWLEDNLSEGIREWWALKPGAPQPKANQQHQDNARGLVLPGYKYLGPGNGLDKGEPVNAADAAALEHDKAYDQQLKAGDNPYLKYNHADAEFQERLKEDTSFGGNLGRAVFQAKKRLLEPLGLVEEAAKTAPGKKRPVEQSPQEPDSSAGIGKSGAQPAKKRLNFGQTGDTESVPDPQPIGEPPAAPSGVGSLTMASGGGAPVADNNEGADGVGSSSGNWHCDSQWLGDRVITTSTRTWALPTYNNHLYKQISNSTSGGSSNDNAYFGYSTPWGYFDFNRFHCHFSPRDWQRLINNNWGFRPKRLNFKLFNIQVKEVTDNNGVKTIANNLTSTVQVFTDSDYQLPYVLGSAHEGCLPPFPADVFMIPQYGYLTLNDGSQAVGRSSFYCLEYFPSQMLRTGNNFQFSYEFENVPFHSSYAHSQSLDRLMNPLIDQYLYYLSKTINGSGQNQQTLKFSVAGPSNMAVQGRNYIPGPSYRQQRVSTTVTQNNNSEFAWPGASSWALNGRNSLMNPGPAMASHKEGEDRFFPLSGSLIFGKQGTGRDNVDADKVMITNEEEIKTTNPVATESYGQVATNHQSAQAQAQTGWVQNQGILPGMVWQDRDVYLQGPIWAKIPHTGGNFHPSPLMGGFGMKHPPPQILIKNTPVPADPPTAFNKDKLNSFITQYSTGQVSVEIEWELQKENSKRWNPEIQYTSNYYKSNNVEFAVNTGGVYSEPRPIGTRYLTRNL

SEQ ID NO: 588 - protein, 736 aa, Artificial Sequence
  Description of Artificial Sequence: Synthetic polypeptide
MAADGYLPDWLEDNLSEGIREWWALKPGAPQPKANQQHQDNARGLVLPGYKYLGPGNGLDKGEPVNAADAAALEHDKAYDQQLKAGDNPYLKYNHADAEFQERLKEDTSFGGNLGRAVFQAKKRLLEPLGLVEEAAKTAPGKKRPVEQSPQEPDSSAGIDKSGAQPAKKRLNFGQTGDTESVPDPQPIGEPPAAPSGVGSLTMASGGGAPVADNNEGADGVGSSSGNWHCDSQWLGDRVITTSTRTWALPTYNNHLYKQISNSTSGGSSNDNAYFGYSTPWGYFDFNRFHCHFSPRDWQRLINNNWGFRPKRLNFKLFNIQVKEVTDNNGVKTIANNLTSTVQVFTDSDYQLPYVLGSAHEGCLPPFPADVFMIPQYGYLTLNDGSQAVGRSSFYCLEYFPSQMLRTGNNFQFSYEFENVPFHSSYAHSQSLDRLMNPLIDQYLYYLSKTINGSGQNQQTLKFSVAGPSNMAVQGRNYIPGPSYRQQRVSTTVTQNNNSEFAWPGASSWALNGRNSLMNPGPAMASHKEGEDRFFPLSGSLIFGKQGTGRDNVDADKVMITNEEEIKTTNPVATESYGQVATNHQSAQAQAQTGWVQNQGILPGMVWQDRDVYLQGPIWAKIPHTDGNFHPSPLMGGFGMKHPPPQILIKNTPVPADPPTAFNKDKLNSFITQYSTGQVSVEIEWELQKENSKRWNPEIQYTSNYYKSNNVEFAVNTEGVYSEPRPIGTRYLTRNL

SEQ ID NO: 589 - protein, 736 aa, Artificial Sequence
  Description of Artificial Sequence: Synthetic polypeptide
MAADGYLPDWLEDNLSEGIREWWALKPGAPQPKANQQHQDNARGLVLPGYKYLGPGNGLDKGEPVNAADAAALEHDKAYDQQLKAGDNPYLKYNHADAEFQERLKEDTSFGGNLGRAVLQAKKRLLEPLGLVEEAAKTAPGKKRPVEQSPQEPDSSAGIGKSGAQPAKKRLNFGQTGDTESVPDPQPIGEPPAAPSGVGSLTMASGGGAPVADNNEGADGVGSSSGNWHCDSQWLGDRVITTSTRTWALPTYNNHLYKQISNSTSGGSSNDNAYFGYSTPWGYFDFNRFHCHFSPRDWQRLINNNWGFRPKRLNFKLFNIQVKEVTDNNGVKTIANNLTSTVQVFTDSDYQLPYVLGSAHEGCLPPFPADVFMIPQYGYLTLNDGSQAVGRSSFYCLEYFPSQMLRTGNNFQFSYEFENVPFHSSYAHSQSLDRLMNPLIDQYLYYLSKTINGSGQNQQTLKFSVAGSSNMAVQGRNYIPGPSYRQQRVSTTVTQNNNSEFAWPGASSWALNGRNSLMNPGPAMASHKEGEDRFFPLSGSLIFGKQGTGRDNVDADKVMITNEEEIKTTNPVATESYGQVATNHQSAQAQAQTGWVQNQGILPGMVWQDRDVYLQGPIWAKIPHTDGNFHPSPLMGGFGMKHPPPQILIKNTPVPADPPTAFNKDKLNSFITQYSTGQVSVEIEWELQKENSKRWNPEIQYTSNYYKSNNVEFAVNTEGVYSEPRPIGTRYLTRNL

SEQ ID NO: 590 - protein, 736 aa, Artificial Sequence
  Description of Artificial Sequence: Synthetic polypeptide
MAADGYLPDWLEDNLSEGIREWWALKPGAPQPKANQQHQDNARGLVLPGYKYLGPGNGLDKGEPVNAADAAALEHDRAYDQQLKAGDNPYLKYNHADAEFQERLKEDTSFGGNLGRAVFQAKKRLLEPLGLVEEAAKTAPGKKRPVEQSPQEPDSSAGIGKSGAQPAKKRLNFGQTGDTESVPDPQPIGEPPAAPSGVGSLTMASGGGAPVADNNEGADGVGSSSGNWHCDSQWLGDRVITTSTRTWALPTYNNHLYKQISNSTSGGSSNDNAYFGYSTPWGYFDFNRFHCHFSPRDWQRLINNNWGFRPKRLNFKLFNIQVKEVTDNNGVKTIANNLTSTVQVFTDSDYQLPYVLGSAHEGCLPPFPADVFMIPQYGYLTLNDGSQAVGRSSFYCLEYFPSQMLRTGNNFQFSYEFENVPFHSSYAHSQSLDRLMNPLIDQYLYYLSKTINGSGQNQQTLKFSVAGPSNMAVQGRNYIPGPSYRQQRVSTTVTQNNNSEFAWPGASSWALNGRNSLMNPGPAMASHKEGEDRFFPLSGSLIFGKQGTGRDNVDADKVMITNEEEIKTTNPVATESYGQVATNHQSAQAQAQTGWVQNQGILPGMVWQDRDVYLQGPIWAKIPHTDGNFHPSPLMGGFGMKHPPPQILIKNTPVPADPPTAFNKDKLNSFITQYSTGQVSVEIEWELQKKNSKRWNPEIQYTSNYYKSNNVEFAVNTEGVYSEPRPIGTRYLTRNL

SEQ ID NO: 591 - protein, 736 aa, Artificial Sequence
  Description of Artificial Sequence: Synthetic polypeptide
MAADGYLPDWLEDNLSEGIREWWALKPGAPQPKANQQHQDNARGLVLPGYKYLGPGNGLDKGEPVNAADAAALEHDKAYDQQLKAGDNPYLKYNHADAEFQERLKEDTSFGGNLGRAVFQAKKRLLEPLGLVEEAAKTAPGKKRPVEQSPQEPDSSAGIGKSGAQPAKKRLNFGQTGDTESVPDPQPIGEPPAAPSGVGSLTMASGGGAPVADNNEGADGVGSSSGNWHCDSQWLGDRVITTSTRTWALPTYNNHLYKQISNSTSGGSSNDNAYFGYSTPWGYFDFNRFHCHFSPRDWQRLINNNWGFRPKRLNFKLFNIQVKEVTDNNGVKTIANNLTSTVQVFTDSDYQLPYVLGSAHEGCLPPFPADVFMIPQYGYLTLNDGSQAVGRSSFYCLEYFPSQMLRTGNNFQFSYEFENVPFHSSYAHSQSLDRLMNPLIDQYLYYLSKTINGSGQNQQTLKFSVAGPSNMAVQGRNYIPGPSYRQQRVSTTVTQNNNSEFAWPGASSWALNGRNSLMNPGPAMASHKEGEDRFFPLSGSLIFGKQGTGRDNVDADKVMITNEEEIKTTNPVATESYGQVATNHQSAQARAQTGWVQNQGILPGMVWQDRDVYLQGPIWAKIPHTDGNFHPSPLMGGFGMKHPPPQILIKNTPVPADPPTAFNKDKLNSFITQYSTGQVSVEIEWELQKENSKRWNPEIQYTSNYYKSNNVEFAVNTEGVYSEPRPIGTRYLTRNL

SEQ ID NO: 592 - protein, 736 aa, Artificial Sequence
  Description of Artificial Sequence: Synthetic polypeptide
MAADGYLPDWLEDNLSEGIREWWALKPGAPQPKANQQHQDNARGLVLPGYKYLGPGNGLDKGEPVNAVDAAALEHDKAYDQQLKAGDNPYLKYNHADAEFQERLKEDTSFGGNLGRAVFQAKKRLLEPLGLVEEAAKTAPGKKRPVEQSPQEPDSSAGIGKSGAQPAKKRLNFGQTGDTESVPDPQPIGEPPAAPSGVGSLTMASGGGAPVADNNEGADGVGSSSGNWHCDSQWLGDRVITTSTRTWALPTYNNHLYKQISNSTSGGSSNDNAYFGYSTPWGYFDFNRFHCHFSPRDWQRLINNNWGFRPKRLNFKLFNIQVKEVTDNNGVKTIANNLTSTVQVFTDSDYQLPYVLGSAHEGCLPPFPADVFMIPQYGYLTLNDGSQAVGRSSFYCLEYFPSQMLRTGNNFQFSYEFENVPFHSSYAHSQSLDRLMNPLIDQYLYYLSKTINGSGQNQQTLKFSVAGPSNMAVQGRNYIPGPSYRQQRVSTTVTQNNNSEFAWPGASSWALNGRNSLMNPGPAMASHKEGEDRFFPLSGSLIFGKQGTGRDNVDADKVMITNEEEIKTTNPVATESYGQVATNHQSAQAQAQTGWVQNQGILPGMVWQDRDVYLQGPIWAKIPHTDGNFHPSPLMGGFGMKHPPPQILIKNTPVPADPPTAFNKDKLNSFITQYSTGQVSVEIEWELQKENSKRWNPEIQYTSNYYKSNNVEFAVNTEGVYSEPRPIGTRYLTRNL

SEQ ID NO: 593 - protein, 736 aa, Artificial Sequence
  Description of Artificial Sequence: Synthetic polypeptide
MAADGYLPDWLEDNLSEGIREWWALKPGAPQPKANQQHQDNARGLVLPGYKYLGPGNGLDKGEPVNAADAAALEHDKAYDQQLKAGDNPYLKYNHADAEFQERLKEDTSFGGNLGRAVFQAKKRLLEPLGLVEEAAKTAPGKKRPVEQSPREPDSSAGIGKSGAQPAKKRLNFGQTGDTESVPDPQPIGEPPAAPSGVGSLTMASGGGAPVADNNEGADGVGSSSGNWHCDSQWLGDRVITTSTRTWALPTYNNHLYKQISNSTSGGSSNDNAYFGYSTPWGYFDFNRFHCHFSPRDWQRLINNNWGFRPKRLNFKLFNIQVKEVTDNNGVKTIANNLTSTVQVFTDSDYQLPYVLGSAHEGCLPPFPADVFMIPQYGYLTLNDGSQAVGRSSFYCLEYFPSQMLRTGNNFQFSYEFENVPFHSSYAHSQSLDRLMNPLIDQYLYYLSKTINGSGQNQQTLKFSVAGPSNMAVQGRNYIPGPSYRQQRVSTTVTQNNNSEFAWPGASSWALNGRNSLMNPGPAMASHKEGEDRFFPLSGSLIFGKQGTGRDNVDADKVMITNEEEIKTTNPVATESYGQVATNHQSAQAQAQTGWVQNQGILPGMVWQDRDVYLQGPIWAKIPHTDGNFHPSPLMGGFGMKHPPPQILIKNTPVPADPPTAFNKDKLNSFITQYSTGQVSVEIEWELQKENSKRWNPEIQYTSNYYKSNNVEFAVNTEGVYSEPRPIGTRYLTRNL

SEQ ID NO: 594 - protein, 736 aa, Artificial Sequence
  Description of Artificial Sequence: Synthetic polypeptide
MAADGYLPDWLEDNLSEGIREWWALKPGAPQPKANQQHQDNARGLVLPGYKYLGPGNGLDKGEPVNAADAAALEHDKAYDQQLKAGDNPYLKYNHADAEFQERLKEDTSFGGNLGRAVFQAKKRLLEPLGLVEEAAKTAPGKKRPVEQSPQEPDSSAGIGKSGAQPAKKRLNFGQTGDTESVPDPQPIGEPPAAPSGVGSLTMASCGGAPVADNNEGADGVGSSSGNWHCDSQWLGDRVITTSTRTWALPTYNNHLYKQISNSTSGGSSNDNAYFGYSTPWGYFDFNRFHCHFSPRDWQRLINNNWGFRPKRLNFKLFNIQVKEVTDNNGVKTIANNLTSTVQVFTDSDYQLPYVLGSAHEGCLPPFPADVFMIPQYGYLTLNDGSQAVGRSSFYCLEYFPSQMLRTGNNFQFSYEFENVPFHSSYAHSQSLDRLMNPLIDQYLYYLSKTINGSGQNQQTLKFSVAGPSNMAVQGRNYIPGPSYRQQRVSTTVTQNNNSEFAWPGASSWALNGRNSLMNPGPAMASHKEGEDRFFPLSGSLIFGKQGTGRDNVDADKVMITNEEEIKTTNPVATESYGQVATNHQSAQAQAQTGWVQNQGILPGMVWQDRDVYLQGPIWAKIPHTDGNFHPSPLMGGFGMKHPPPQILIKNTPVPADPPTAFNKDKLNSFITQYSTGQVSVEIEWELQKENSKRWNPEIQYTSNYYKSNNVEFAVNTEGVYSEPRPIGTRYLTRNL

SEQ ID NO: 595 - protein, 736 aa, Artificial Sequence
  Description of Artificial Sequence: Synthetic polypeptide
MAADGYLPDWLEDNLSEGIREWWALKPGAPQPKANQQHQDNARGLVLPGYKYLGPGNGLDKGEPINAADAAALEHDKAYDQQLKAGDNPYLKYNHADAEFQERLKEDTSFGGNLGRAVFQAKKRLLEPLGLVEEAAKTAPGKKRPVEQSPQEPDSSAGIGKSGAQPAKKRLNFGQTGDTESVPDPQPIGEPPAAPSGVGSLTMASGGGAPVADNNEGADGVGSSSGNWHCDSQWLGDRVITTSTRTWALPTYNNHLYKQISNSTSGGSSNDNAYFGYSTPWGYFDFNRFHCHFSPRDWQRLINNNWGFRPKRLNFKLFNIQVKEVTDNNGVKTIANNLTSTVQVFTDSDYQLPYVLGSAHEGCLPPFPADVFMIPQYGYLTLNDGSQAVGRSSFYCLEYFPSQMLRTGNNFQFSYEFENVPFHSSYAHSQSLDRLMNPLIDQYLYYLSKTINGSGQNQQTLKFSVAGPSNMAVQGRNYIPGPSYRQQRVSTTVTQNNNSEFAWPGASSWALNGRNSLMNPGPAMASHKEGEDRFFPLSGSLIFGKQGTGRDNVDADKVMITNEEEIKTTNPVATESYGQVATNHQSAQAQAQTGWVQNQGILPGMVWQDRDVYLQGPIWAKIPHTYGNFHPSPLMGGFGMKHPPPQILIKNTPVPADPPTAFNKDKLNSFITQYSTGQVSVEIEWELQKENSKRWNPEIQYTSNYYKSNNVEFAVNTEGVYSEPRPIGTRYLTRNL

SEQ ID NO: 596 - protein, 736 aa, Artificial Sequence
  Description of Artificial Sequence: Synthetic polypeptide
MAADGYLPDWLEDNLSEGIREWWALKPGAPQPKANQQHQDNARGLVLPGYKYLGPGNGLDKGEPVNAADAAALEHDKAYDQQLKAGDNPYLKYNHADAEFQERLKEDTSFGGNLGRAVFQAKKRLLEPLGLVEEAAKTAPGKKRPVEQSPQEPDSSAGIGKSGAQPAKKRLNFGQTGDTESVPDPQPIGEPPAAPSGVGSLTMASGGGAPVADNNEGADGVGSSSGNWHCDSQWLGDRVITTSTRTWALPTYNNHLYKQISNSTSGGSSNDNAYFGYSTPWGYFDFNRFHCHFSPHDWQRLINNNWGFRPKRLNFKLFNIQVKEVTDNNGVKTIANNLTSTVQVFTDSDYQLPYVLGSAHEGCLPPFPADVFMIPQYGYLTLNDGSQAVGRSSFYCLEYFPSQMLRTGNNFQFSYEFENVPFHSSYAHSQSLDRLMNPLIDQYLYYLSKTINGSGQNQQTLKFNVAGPSNMAVQGRNYIPGPSYRQQRVSTTVTQNNNSEFAWPRASSWALNGRNSLMNPGPAMASHKEGEDRFFPLSGSLIFGKQGTGRDNVDADKVMITNEEEIKTTNPVATESYGQVATNHQSAQAQAQTGWVQNQGILPGMVWQDRDVYLQGPIWAKIPHTDGNFHPSPLMGGFGMKHPPPQILIKNTPVPADPPTAFNKDKLNSFITQYSTGQVSMEIEWELQKENSKRWNPEIQYTSNYYKSNNVEFAVNTEGVYSEPRPIGTRYLTRNL

SEQ ID NO: 597 - protein, 736 aa, Artificial Sequence
  Description of Artificial Sequence: Synthetic polypeptide
MAADGYLPDWLEDNLSEGIREWWALKPGAPQPKANQQHQDNARGLVLPGYKYLGPGNGLDKGEPVNAADAAALEHDKAYDQQLKAGDNPYLKYNHADAEFQERLKEDTSFGGNLGRAVFQAKKRLLEPLGLVEEAAKTAPGKKRPVEQSPQEPDSSAGIGKSGAQPAKKRLNFGQTGDTESVPDPQPIGEPPAAPSGVGSLTMASGGGAPVADNNEGADGVGSSSGNWHCDSQWLGDRVITTSTRTWALPTYNNHLYKQISNSTSGGSSNDNAYFGYSTPWGYFDFNRFHCHFSPRDWQRLINNNWGFRPKRLNFKLFNIQVKEVTDNNGVKTIANNLTSTVQVFTDSDYQLPYVLGSAHEGCLPPFPADVFMIPQYGYLTLNDGSQAVGRSSFYCLEYFPSQMLRTGNNFQFSYEFENVPFHSSYAHSQSLDRLMNPLIDQYLYYLSKTINGSGQNQQTLKFSVAGPSNMAVQGRNYIPGPSYRQQRVSTTVTQNNNSEFAWPRASSWALNGRNSLMNPGPAMASHKEGEDRFFPLSGSLIFGKQGTGRDNVDADKVMITNEEEIKTTNPVATESYGQVATNHQSAQAQAQTGWVQNQGILPGMVWQDRDVYLQGPIWAKIPHTDGNFHPSPLMGGFGMKHPPPQILIKNTPVPADPPTAFNKDKLNSFITQYSTGQVSVEIEWELQKENSKRWNPEIQYTSNYYKSNNVEFAVNTEGVYSEPRPIGTRYLTRNL

SEQ ID NO: 598 - protein, 736 aa, Artificial Sequence
  Description of Artificial Sequence: Synthetic polypeptide
MAADGYLPDWLEDNLSEGIREWWALKPGAPQPKANQQHQDNARGLVLPGYKYLGPGNGLDKGEPVNAADAAALEHDKAYDQQLKAGDNPYLKYNHADAEFQERLKEDTSFGGNLGRAVFQAKKRLLEPLGLVEEAAKTAPGKKRPVEQSPQEPDSSAGIGKSGAQPAKKRLNFGQTGDTESVPDPQPIGEPPAAPSGVGSLTMASGGGAPVADNNEGADGVGSSSGNWHCDSQWLGDRVITTSTRTWALPTYNNHLYKQISNSTSGGSSNDNAYFGYSTPWGYFDFNRFHCHFSPRDWQRLINNNWGFRPKRLNFKLFNIQVKEVTDNNGVKTIANNLTSTVQVFTDSDYQLPYVLGSAHEGCLPPFPADVFMIPQYGYLTLNDGSQAVGRSSFYCLEYFPSQMLRTGNNFQFSYEFENVPFHSSYAHSQSLDRLMNPLIDQYLYYLSKTINGSGQNQQTLKFSVAGPSNMAVQGRNYIPGPSYRQQRVSTTVTQNNNSEFAWPRASSWALNGRNSLMNPGPAMASHKEGEDRFFPLSGSLIFGKQGTGRDNVDADKVMITNEEEIKTTNPVATESYGQVATNHQSAQAQAQTGWVQNQGILPGMVWQDRDVYLQGPIWAKIPHTDGNFHPSPLMGGFGMKHPPPQILIKNTPVPADPPTAFNKDKLNSFITQYSTGQVSVEIEWERQKENSKRWNPEIQYTSNYYKSNNVEFAVNTEGVYSEPRPIGTRYLTRNL

SEQ ID NO: 599 - protein, 736 aa, Artificial Sequence
  Description of Artificial Sequence: Synthetic polypeptide
MAADGYLPDWLEDNLSEGIREWWALKPGAPQPKANQQHQDNARGLVLPGYKYLGPGNGLDKGEPVNAADAAALEHDKAYDQQLKAGDNPYLKYNHADAEFQERLKEDTSFGGNLGRAVFQAKKRLLEPLGLVEEAAKTAPGKKRPVEQSPQEPDSSAGIGKSGAQPAKKRLNFGQTGDTESVPDPQPIGEPPAAPSGVGSLTMASGGGAPVADNNEGADGVGSSSGNWHCDSQWLGDRVITTSTRTWALPTYNNHLYKQISNSTSGGSSNDNAYFGYSTPWGYFDFNRFHCHFSPRDWQRLINNNWGFRPKRLNFKLFNIQVKEVTDNNGVKTIANNLTSTVQVFADSDYQLPYVLGSAHEGCLPPFPADVFMIPQYGYLTLNDGSQAVGRSSFYCLEYFPSQMLRTGNNFQFSYEFENVPFHSSYAHSQSLDRLMNPLIDQYLYYLSKTINGSGQNQQTLKFSVAGPSNMAVQGRNYIPGPSYRQQRVSTTVTQNNNSEFAWPRASSWALNGRNSLMNPGPAMASHKEGEDRFFPLSGSLIFGKQGTGRDNVDADKVMITNEEEIKTTNPVATESYGQVATNHQSAQAQAQTGWVQNQGILPGMVWQDRDVYLQGPIWAKIPHTDGNFHPSPLMGGFGMKHPPPQILIKNTPVPADPPTAFNKDKLNSFITQYSTGQVSVEIEWELQKENSKRWNPEIQYTSNYYKSNNVEFAVNTEGVYSEPRPIGTRYLTRNL

SEQ ID NO: 600 - protein, 736 aa, Artificial Sequence
  Description of Artificial Sequence: Synthetic polypeptide
MAADGYLPDWLEDNLSEGIREWWALKPGAPQPKANQQHQDNARGLVLPGYKYLGPGNGLDKGEPVNAADAAALEHDKAYDQQLKAGDNPYLKYNHADAEFQERLKEDTSFGGNLGRAVFQAKKRLLEPLGLVEEAAKTAPGKKRPVEQSPQEPDSSAGIGKSGAQPAKKRLNFGQTGDTESVPDPQPIGEPPAAPSGVGSLTMASGGGAPVADNNEGADGVGSSSGNWHCDSQWLGDRVITTSTRTWALPTYNNHLYKQISNSTSGGSSNDNAYFGYSTPWGYFDFNRFHCHFSPRDWQRLINNNWGFRPKRLNFKLFNIQVKEVTDNNGVKTIANNLTSTVQVFTDSDYQLPYVLGSAHEGCLPPFPADVFMIPQYGYLTLNDGSQAVGRSSFYCLEYFPSQMLRTGNNFQFSYEFENVPFHSSYAHSQSLDRLMNPLIDQYLYYLSKTINGSGQNQQTLKFSVAGPSNMAVQGRNYIPGPSYRQQRVSTTVTQNNNSEIAWPRASSWALNGRNSLMNPGPAMASHKEGEDRFFPLSGSLIFGKQGTGRDNVDADKVMITNEEEIKTTNPVATESYGQVATNHQSAQAQAQTGWVQNQGILPGMVWQDRDVYLQGPIWAKIPHTDGNFHPSPLMGGFGMKHPPPQILIKNTPVPADPPTAFNKDKLNSFITQYSTGQVSVEIEWELQKENSKRWNPEIQYTSNYCKSNNVEFAVNTEGVYSEPRPIGTRYLTRNL

SEQ ID NO: 601 - protein, 736 aa, Artificial Sequence; identical to SEQ ID NO: 597
  Description of Artificial Sequence: Synthetic polypeptide

SEQ ID NO: 602 - DNA, 2208 bp, Artificial Sequence
  Description of Artificial Sequence: Synthetic polynucleotide
atggctgccgatggttatcttccagattggctcgaggacaaccttagtgaaggaattcgcgagtggtgggctttgaaacctggagcccctcaacccaaggcaaatcaacaacatcaagacaacgctcgaggtcttgtgcttccgggttacaaataccttggacccggcaacggactcgacaagggggagccggtcaacgcagcagacgcggcggccctcgagcacgacaaggcctacgaccagcagctcaaggccggagacaacccgtacctcaagtacaaccacgccgacgccgagttccaggagcggctcaaagaagatacgtcttttgggggcaacctcgggcgagcagtcttccaggccaaaaagaggcttcttgaacctcttggtctggttgaggaagcggctaagacggctcctggaaagaagaggcctgtagagcagtctcctcaggaaccggactcctccgcgggtattggcaaatcgggtgcacagcccgctaaaaagagactcaatttcggtcagactggcgacacagagtcagtcccagaccctcaaccaatcggagaacctcccgcagccccctcaggtgtgggatctcttacaatggcttcaggtggtggcgcaccagtggcagacaataacgaaggtgccgatggagtgggtagttcctcgggaaattggcattgcgattcccaatggctgggggacagagtcatcaccaccagcacccgaacctgggccctgcccacctacaacaatcacctctacaagcaaatctccaacagcacatctggaggatcttcaaatgacaacgcctacttcggctacagcaccccctgggggtattttgacttcaacagattccactgccacttctcaccacgtgactggcagcgactcatcaacaacaactggggattccggcctaagcgactcaacttcaagctcttcaacattcaggtcaaagaggttacggacaacaatggagtcaagaccatcgccaataaccttaccagcacggtccaggtcttcacggactcagactatcagctcccgtacgtgctcgggtcggctcacgagggctgcctcccgccgttcccagcggacgttttcatgattcctcagtacgggtatctgacgcttaatgatggaagccaggccgtgggtcgttcgtccttttactgcctggaatatttcccgtcgcaaatgctaagaacgggtaacaacttccagttcggctacgagtttgagaacgtacctttccatagcagctacgctcacagccaaagcctggaccgactaatgaatccactcatcgaccaatacttgtactatctctcaaagactattaacggttctggacagaatcaacaaacgctaaaattcagtgtggccggacccagcaacatggctgtccagggaagaaactacatacctggacccagctaccgacaacaacgtgtctcaaccactgtgactcaaaacaacaacagcgaatttgcttggcctggagcttcttcttgggctctcaatggacgtaatagcttgatgaatcctggacctgctatggccagccacaaagaaggagaggaccgtttctttcctttgtctggatctttaatttttggcaaacaaggaactggaagagacaacgtggatgcggacaaagtcatgataaccaacgaagaagaaattaaaactactaacccggtagcaacggagtcctatggacaagtggccacaaaccaccagagtgcccaagcacaggcgcagaccggctgggttcaaaaccaaggaatacttccgggtatggtttggcaggacagagatgtgtacctgcaaggacccatttgggccaaaattcctcacacggacggcaactttcacccttctccgctgatgggagggtttggaatgaagcacccgcctcctcagatcctcatcaaaaacacacctgtacctgcggatcctccaacggccttcaacaaggacaagctgaactctttcatcacccagtattctactggccaagtcagcgtggagatcgagtgggagctgcagaaggaaaacagcaagcgctgggacccggagatccagtacacttccaactattacaagtctaataatgttgaatttgctgttaatactgaaggtgtatatagtgaaccccgccccattggcaccagatacctgactcgtaatctg

SEQ ID NO: 603 - DNA, 2208 bp, Artificial Sequence
  Description of Artificial Sequence: Synthetic polynucleotide
atggctgccgatggttatcttccagattggctcgaggacaaccttagtgaaggaattcgcgagtggtgggctttgaaacctggagcccctcaacccaaggcaaatcaacaacatcaagacaacgctcgaggtcttgtgcttccgggttacaaataccttggacccggcaacggactcgacaagggggagccggtcaacgcagcagacgcggcggccctcgagcacgacaaggcctacgaccagcagctcaaggccggagacaacccgtacctcaagtacaaccacgccgacgccgagttccaggagcggctcaaagaagatacgtcttttgggggcaacctcgggcgagcagtcttccaggccaaaaagaggcttcttgaacctcttggtctggttgaggaagcggctaagacggctcctggaaagaagaggcctgtagagcagtctcctcaggaaccggactcctccgcgggtattggcaaatcgggtgcacagcccgctaaaaagagactcaatttcggtcagactggcgacacagagtcagtcccagaccctcaaccaatcggagaacctcccgcagccccctcaggtgtgggatctcttacaatggcttcaggtggtggcgcaccagtggcagacaataacgaaggtgccgatggagtgggtagttcctcgggaaattggcattgcgattcccaatggctgggggacagagtcatcaccaccagcacccgaacctgggccctgcccacctacaacaatcacctctacaagcaaatctccaacagcacatctggaggatcttcaaatgacaacgcctacttcggctacagcaccccctgggggtattttgacttcaacagattccactgccgcttctcaccacgtgactggcagcgactcatcaacaacaactggggattccggcctaagcgactcaacttcaagctcttcaacattcaggtcaaagaggttacggacaacaatggagtcaagaccatcgccaataaccttaccagcacggtccaggtcttcacggactcagactatcagctcccgtacgtgctcgggtcggctcacgagggctgcctcccgccgttcccagcggacgttttcatgattcctcagtacgggtatctgacgcttaatgatggaagccaggccgtgggtcgttcgtccttttactgcctggaatatttcccgtcgcaaatgctaagaacgggtaacaacttccagttcagctacgagtttgagaacgtacctttccatagcagctacgctcacagccaaagcctggaccgactaatgaatccactcatcgaccaatacttgtactatctctcaaagactattaacggttctggacagaatcaacaaacgctaaaattcagtgtggccggacccagcaacatggctgtccagggaagaaactacatacctggacccagctaccgacaacaacgtgtctcaaccactgtgactcaaaacaacaacagcgaatttgcttggcctggagcttcttcttgggctctcaatggacgtaatagcttgatgaatcctggacctgctatggccagccacaaagaaggagaggaccgtttctttcctttgtctggatctttaatttttggcaaacaaggaactggaagagacaacgtggatgcggacaaagtcatgataaccaacgaagaagaaattaaaactactaacccggtagcaacggagtcctatggacaagtggccacaaaccaccagagtgcccaagcacaggcgcagaccggctgggttcaaaaccaaggaatacttccgggtatggtttggcaggacagagatgtgtacctgcaaggacccatttgggccaaaattcctcacacggacggcaactttcacccttctccgctgatgggagggtttggaatgaagcacccgcctcctcagatcctcatcaaaaacgcccctgtacctgcggatcctccaacggccttcaacaaggacaagctgaactctttcatcacccagtattctactggccaagtcagcgtggagatcgagtgggagctgcagaaggaaaacagcaagcgctggaacccggagatccagtacacttccaactattacaagtctaataatgttgaatttgctgttaatactgaaggtgtatatagtgaaccccgccccattggcaccagatacctgactcgtaatctg

SEQ ID NO: 604 - DNA, 2208 bp, Artificial Sequence
  Description of Artificial Sequence: Synthetic polynucleotide
atggctgccgatggttatcttccagattggctcgaggacaaccttagtgaaggaattcgcgagtggtgggctttgaaacctggagcccctcaacccaaggcaaatcaacaacatcaagacaacgctcgaggtcttgtgcttccgggttacaaataccttggacccggcaacggactcgacaagggggagccggtcagcgcagcagacgcggcggccctcgagcacgacaaggcctacgaccagcagctcaaggccggagacaacccgtacctcaagtacaaccacgccgacgccgagttccaggagcggctcaaagaagatacgtcttttgggggcaacctcgggcgagcagtcttccaggccaaaaagaggcttcttgaacctcttggtctggttgaggaagcggctaagacggctcctggaaagaagaggcctgtagagcagtctcctcaggaaccggactcctccgcgggtattggcaaatcgggtgcacagcccgctaaaaagagactcaatttcggtcagactggcgacacagagtcagtcccagaccctcaaccaatcggagaacctcccgcagccccctcaggtgtgggatctcttacaatggcttcaggtggtggcgcaccagtggcagacaataacgaaggtgccgatggagtgggtagttcctcgggaaattggcattgcgattcccaatggctgggggacagagtcatcaccaccagcacccgaacctgggccctgcccacctacaacaatcacctctacaagcaaatctccaacagcacatctggaggatcttcaaatgacaacgcctacttcggctacagcaccccctgggggtattttgacttcaacagattccactgccacttctcaccgcgtgactggcagcgactcatcaacaacaactggggattccggcctaagcgactcaacttcaagctcttcaacattcaggtcaaagaggttacggacaacaatggagtcaagaccatcgccaataaccttaccagcacggtccaggtcttcacggactcagactatcagctcccgtacgtgctcgggtcggctcacgagggctgcctcccgccgttcccagcggacgttttcatgattcctcagtacgggtatctgacgcttaatgatggaagccaggccgtgggtcgttcgtccttttactgcctggaatatttcccgtcgcaaatgctaagaacgggtaacaacttccagttcagctacgagtttgagaacgtacctttccatagcagctacgctcacagccaaagcctggaccgactaatgaatccactcatcgaccaatacttgtactatctctcaaagactattaacggttctggacagaatcaacaaacgctaaaattcagtgtggccggacccagcaacatggctgtccagggaagaaactacatacctggacccagctaccgacaacaacgtgtctcaaccactgtgactcaaaacaacaacagcgaatttgcttggcctggagcttcttcttgggctctcaatggacgtaatagcttgatgaatcctggacctgctatggccagccacaaagaaggagaggaccgtttctttcctttgtctggatctttaatttttggcaaacaaggaactggaagagacaacgtggatgcggacaaagtcatgataaccaacgaagaagaaattaaaactactaacccggtagcaacggagtcctatggacaagtggccacaaaccaccagagtgcccaagcacaggcgcagaccggctgggttcaaaaccaaggaatacttccgggtatggtttggcaggacagagatgtgtacctgcaaggacccatttgggccaaaattcctcacacggacggcaactttcacccttctccgctgatgggagggtttggaatgaagcacccgcctcctcagatcctcatcaaaaacacacctgtacctgcggatcctccaacggccttcaacaaggacaagctgaactctttcatcacccagtattctactggccaagtcagcgtggagatcgagtgggagctgcagaaggaaaacagcaagcgctggaacccggagatccagtacacttccaactattacaagtctaataatgttgaatttgctgttaatactgaaggtgtatatagtgaaccccgccccattggcaccagatacctgactcgtaatctg

SEQ ID NO: 605 - DNA, 2208 bp, Artificial Sequence
  Description of Artificial Sequence: Synthetic polynucleotide
atggctgccgatggttatcttccagattggctcgaggacaaccttagtgaaggaattcgcgagtggtgggctttgaaacctggagcccctcaacccaaggcaaatcaacaacatcaagacaacgctcgaggtcttgtgcttccgggttacaaataccttggacccggcaacggactcgacaagggggagccggtcaacgcagcagacgcggcggccctcgagcacgacaaggcctacgaccagcagctcaaggccggagacaacccgtacctcaagtacaaccacgccgacgccgagttccaggagcggctcaaagaagatacgtcttttgggggcaacctcgggcgagcagtcttccaggccaaaaagaggcttcttgaacctcttggtctggttgaggaagcggctaagacggctcctggaaagaagaggcctgtagagcagtctcctcaggaaccggactcctccgcgggtattggcaaatcgggtgcacagcccgctaaaaagagactcaatttcggtcagactggcgacacagagtcagtcccagaccctcaaccaatcggagaacctcccgcagccccctcaggtgtgggatctcttacaatggcttcaggtggtggcgcaccagtggcagacaataacgaaggtgccgatggagtgggtagttcctcgggaaattggcattgcgattcccaatggctgggggacagagtcatcaccaccagcacccgaacctgggccctgcccacctacaacaatcacctctacaagcaaatctccaacagcacatctggaggatcttcaaatgacaacgcctacttcggctacagcaccccctgggggtattttgacttcaacagattccactgccacttctcaccacgtgactggcagcgactcatcaacaacaactggggattccggcctaagcgactcaacttcaagctcttcaacattcaggtcaaagaggttacggacaacaatggagtcaagaccatcgccaataaccttaccagcacggtccaggtcttcacggactcagactatcagctcccgtacgtgctcgggtcggctcacgagggctgcctcccgccgttcccagcggacgttttcatgattcctcagtacgggtatctgacgcttaatgatggaagccaggccgtgggtcgttcgtccttttactgcctggaatatttcccgtcgcaaatgctaagaacgggtaacaacttccagttcagctacgagtttgagaacgtacctttccatagcagctacgctcacagccaaagcctggaccgactaatgaatccactcatcgaccaatacttgtactatctctcaaagactattaacggttctggacagaatcaacaaacgctaaaattcagtgtggccggacccagcaacacggctgtccagggaagaaactacatacctggacccagctaccgacaacaacgtgtctcaaccactgtgactcaaaacaacaacagcgaatttgcttggcctggagcttcttcttgggctctcaatggacgtaatagcttgatgaatcctggacctgctatggccagccacaaagaaggagaggaccgtttctttcctttgtctggatctttaatttttggcaaacaaggaactggaagagacaacgtggatgcggacaaagtcatgataaccaacgaagaagaaattaaaactactaacccggtagcaacggagtcctatggacaagtggccacaaaccaccagagtgcccaagcacaggcgcagaccggctgggttcaaaaccaaggaatacttccgggtatggtttggcaggacagagatgtgtacctgcaaggacccatttgggccaaaattcctcacacggacggcaactttcacccttctccgctgatgggagggtttggaatgaagcacccgcctcctcagatcctcatcaaaaacacacctgtacctgcggatcctccaacggccttcaacaaggacaagctgaactctttcatcacccagtattctactggccaagtcagcgtggagatcgagtgggagctgcagaaggaaaacagcaagcgctggaacccggagatccagtacacttccaactattacaagtctaataatgttgaatttgctgttaatactgaaggtgtatatagtgaaccccgccccattggcaccagatacctgactcgtaatctg

SEQ ID NO: 606 - DNA, 2208 bp, Artificial Sequence
  Description of Artificial Sequence: Synthetic polynucleotide
atggctgccgatggttatcttccagattggctcgaggacaaccttagtgaaggaattcgcgagtggtgggctttgaaacctggagcccctcaacccaaggcaaatcaacaacatcaagacaacgctcgaggtcttgtgcttccgggttacaaataccttggacccggcaacggactcgacaagggggagccggtcaacgcagcagacgcggcggccctcgagcacgacaaggcctacgaccagcagctcaaggccggagacaacccgtacctcaagtacaaccacgccgacgccgagttccaggagcggctcaaagaagatacgtcttttgggggcaacctcgggcgagcagtcttccaggccaaaaagaggcttcttgaacctcttggtctggttgaggaagcggctaagacggctcctggaaagaagaggcctgtagagcagtctcctcaggaaccggactcctccgcgggtattggcaaatcgggtgcacagcccgctaaaaagagactcaatttcggtcagactggcgacacagagtcagtcccagaccctcaaccaatcggagaacctcccgcagccccctcaggtgtgggatctcttacaatggcttcaggtggtggcgcaccagtggcagacaataacgaaggtgccgatggagtgggtagttcctcgggaaattggcattgcgattcccaatggctgggggacagagtcatcaccaccagcacccgaacctgggccctgcccacctacaacaatcacctctacaagcaaatctccaacagcacatctggaggatcttcaaatgacaacgcctacttcggctacagcaccccctgggggtattttgacttcaacagattccactgccacttctcaccacgtgactggcagcgactcatcaacaacaactggggattccggcctaagcggctcaacttcaagctcttcaacattcaggtcaaagaggttacggacaacaatggagtcaagaccatcgccaataaccttaccagcacggtccaggtcttcacggactcagactatcagctcccgtacgtgctcgggtcggctcacgagggctgcctcccgccgttcccagcggacgttttcatgattcctcagtacgggtatctgacgcttaatgatggaagccaggccgtgggtcgttcgtccttttactgcctggaatatttcccgtcgcaaatgctaagaacgggtagcaacttccagttcagctacgagtttgagaacgtacctttccatagcagctacgctcacagccaaagcctggaccgactaatgaatccactcatcgaccaatacttgtactatctctcaaagactattaacggttctggacagaatcaacaaacgctaaaattcagtgtggccggacccagcaacatggctgtccagggaagaaactacatacctggacccagctaccgacaacaacgtgtctcaaccactgtgactcaaaacaacaacagcgaatttgcttggcctggagcttcttcttgggctctcaatggacgtaatagcttgatgaatcctggacctgctatggccagccacaaagaaggagaggaccgtttctttcctttgtctggatctttaatttttggcaaacaaggaactggaagagacaacgtggatgcggacaaagtcatgataaccaacgaagaagaaattaaaactactaacccggcagcaacggagtcctatggacaagtggccacaaaccaccagagtgcccaagcacaggcgcagaccggctgggttcaaaaccaaggaatacttccgggtatggtttggcaggacagagatgtgtacctgcaaggacccatttgggccaaaattcctcacacggacggcaactttcacccttctccgctgatgggagggtttggaatgaagcacccgcctcctcagatcctcatcaaaaacacacctgtacctgcggatcctccaacggccttcaacaaggacaagctgaactctttcatcacccagtattctactggccaagtcagcgtggagatcgagtgggagctgcagaaggaaaacagcaagcgctggaacccggagatccagcacacttccaactattacaagtctaataatgttgaatttgctgttaatactgaaggtgtatatagtgaaccccgccccattggcaccagatacctgactcgtaatctg

SEQ ID NO: 607 - DNA, 2208 bp, Artificial Sequence
  Description of Artificial Sequence: Synthetic polynucleotide
atggctgccgatggttatcttccagattggctcgaggacaaccttagtgaaggaattcgcgagtggtgggctttgaaacctggagcccctcaacccaaggcaaatcaacaacatcaagacaacgctcgaggtcttgtgcttccgggttacaaataccttggacccggcaacggactcgacaagggggagccggtcaacgcagcagacgcggcggccctcgagcacgacaaggcctacgaccagcagctcaaggccggagacaacccgtacctcaagtacaaccacgccgacgccgagttccaggagcggctcaaagaagatacgtcttttgggggcaacctcgggcgagcagtcttccaggccaaaaagaggcttcttgaacctcttggtctggttgaggaagcggctaagacggctcctggaaagaagaggcctgtagagcagtctcctcaggaaccggactcctccgcgggtattggcaaatcgggtgcacagcccgctaaaaagagactcaatttcggtcagactggcgacacagagtcagtcccagaccctcaaccaatcggagaacctcccgcagccccctcaggtgtgggatctcttacaatggcttcaggtggtggcgcaccagtggcagacaataacgaaggtgccgatggagtgggtagttcctcgggaaattggcattgcgattcccaatggctgggggacagagtcatcaccaccagcacccgaacctgggccctgcccacctacaacaatcacctctacaagcaaatctccaacagcacatctggaggatcttcaaatgacaacgcctacttcggctacagcaccccctgggggtattttgacttcaacagattccactgccacttctcaccacgtgactggcagcgactcatcaacaacaactggggattccggcctaagcgactcaacttcaggctcttcaacattcaggtcaaagaggttacggacaacaatggagtcaagaccatcgccaataaccttaccagcacggtccaggtcttcacggactcagactatcagctcccgtacgtgctcgggtcggctcacgagggctgcctcccgccgttcccagcggacgttttcatgattcctcagtacgggtatctgacgcttaatgatggaagccaggccgtgggtcgttcgtccttttactgcctggaatatttcccgtcgcaaatgctaagaacgggtaacaacttccagttcagctacgagtttgagaacgtacctttccatagcagctacgctcacagccaaagcctggaccgactaatgaatccactcatcgaccaatacttgtactatctctcaaagactattaacggttctggacagaatcaacaaacgctaaaattcagtgtggccggacccagcaacatggctgtccagggaagaaactacatacctggacccagctaccgacaacaacgtgtctcaaccactgtgactcaaaacaacaacagcgaatttgcttggcctggagcttcttcttgggctctcaatggacgtaatagcttgatgaatcctggacctgctatggccagccacaaagaaggagaggaccgtttctttcctttgtctggatctttaatttttggcaaacaaggaactggaagagacaacgtggatgcggacaaagtcatgataaccaacgaagaagaaattaaaactactaacccggtagcaacggagtcctatggacaagtggccacaaaccaccagagtgcccaagcacaggcgcagaccggctgggttcaaagccaaggaatacttccgggtatggtttggcaggacagagatgtgtacctgcaaggacccatttgggccaaaattcctcacacggacggcaactttcacccttctccgctgatgggagggtttggaatgaagcacccgcctccccagatcctcatcaaaaacacacctgtacctgcggatcctccaacggccttcaacaaggacaagctgaactctttcatcacccagtattctactggccaagtcagcgtggagatcgagtgggagctgcagaaggaaaacagcaagcgctggaacccggagatccagtacacttccaactattacaagtctaataatgttgaatttgctgttaatactgaaggtgtatatagtgaaccccgccccattggcaccagatacctgactcgtaatctg

SEQ ID NO: 608 - DNA, 2205 bp, Artificial Sequence
  Description of Artificial Sequence: Synthetic polynucleotide
atggctgccgatggttatcttccagattggctcgaggacaaccttagtgaaggaattcgcgagtggtgggctttgaaacctggagcccctcaacccaaggcaaatcaacaacatcaagacaacgcccgaggtcttgtgcttccgggttacaaataccttggacccggcaacggactcgacaagggggagccggtcaacgcagcagacgcggcggccctcgagcacgacaaggcctacgaccagcagctcaaggccggagacaacccgtacctcaagtacaaccacgccgacgccgagttccaggagcggctcaaagaagatacgtcttttgggggcaacctcgggcgagcagtcttccaggccaaaaagaggcttcttgaacctcttggtctggttgaggaagcggctaagacggctcctggaaagaagaggcctgtagagcagtctcctcaggaaccggactcctccgcgggtattggcaaatcgggtgcacagcccgctaaaaagagactcaatttcggtcagactggcgacacagagtcagtcccagaccctcaaccaatcggagaacctcccgcagccccctcaggtgtgggatctcttacaatggcttcaggtggtggcgcaccagtggcagacaataacgaaggtgccgatggagtgggtagttcctcgggaaattggcattgcgattcccaatggctgggggacagagtcatcaccaccagcacccgaacctgggccctgcccacctacaacaatcacctctacaagcaaatctccaacagcacatctggaggatcttcaaatgacaacgcctacttcggctacagcaccccctggaggtattttgacttcaacagattccactgccacttctcaccacgtgactggcagcgactcatcaacaactggggattccggcctaagcgactcaacttcaagctcttcaacattcaggtcaaagaggttacggacaacaatggagtcaagaccatcgccaataaccttaccagcacggtccaggccttcacggactcagactatcagctcccgtacgtgctcgggtcggctcacgagggctgcctcccgccgttcccagcggacgttttcatgattcctcagtacgggtatctgacgcttaatgatggaagccaggccgtgggtcgttcgtccttttactgcctggaatatttcccgtcgcaaatgctaagaacgggtaacaacttccagttcagctacgagtttgagaacgtacctttccatagcagctacgctcacagccaaagcctggaccgactaatgaatccactcatcgaccaatacttgtactatctctcaaagactattaacggttctggacagaatcaacaaacgctaaaattcagtgtggccggacccagcaacatggctgtccagggaagaaactacatacctggacccagctaccgacaacaacgtgtctcaaccactgtgactcaaaacaacaacagcgaatttgcttggcctggagcttcttcttgggctctcaatggacgtaatagcttgatgaatcctggacctgctatggccagccacaaagaaggagaggaccgtttctttcctttgtctggatctttaatttttggcaaacaaggaactggaagagacaacgtggatgcggacaaagtcatgataaccaacgaagaagaaattaaaactactaacccggtagcaacggagtcctatggacaagtggccacaaaccaccagagtgcccaagcacaggcgcagaccggctgggttcaaaaccaaggaatacttccgggtatggtttggcaggacagagatgtgtacctgcaaggacccatttgggccaaaattcctcacacggacggcaactttcacccttctccgctgatgggagggtttggaatgaagcacccgcctcctcagatcctcatcaaaaacacacctgtacctgcggatcctccaacggccttcaacaaggacgagctgaactctttcatcacccagtattctactggccaagtcagcgtggagatcgagtgggagctgcagaaggaaaacagcaagcgctggaacccggagatccagtacacttccaactattacaagtctaataatgttgaatttgctgttaatactgaaggtgtatatagtgaaccccgccccattggcaccagatacctgactcgtaatctg

SEQ ID NO: 609 - DNA, 2205 bp, Artificial Sequence
  Description of Artificial Sequence: Synthetic polynucleotide
atggctgccgatggttatcttccagattggctcgaggacaaccttagtgaaggaattcgcgagtggtgggctttgaaacctggagcccctcaacccaaggcaaatcaacaacatcaagacaacgctcgaggtcttgtgcttccgggttacaaataccttggacccggcaacggactcgacaagggggagccggtcaacgcagcagacgcggcggccctcgagcacgacaaggcctacgaccagcagctcaaggccggagacaacccgtacctcaagtacaaccacgccgacgccgagttccaggagcggctcaaagaagatacgtcttttgggggcaacctcgggcgagcagtcttccaggacaaaaagaggcttcttgaacctcttggtctggttgaggaagcggctaagacggctcctggaaagaagaggcctgtagagcagtctcctcaggaaccggactcctccgcgggtattggcaaatcgggtgcacagcccgctaaaaagagactcaatttcggtcagactggcgacacagagtcagtcccagaccctcaaccaatcggagaacctcccgcagccccctcaggtgtgggatctcttacaatggcttcaggtggtggcgcaccagtggcagacaataacgaaggtgccgatggagtgggtagttcctcgggaaattggcattgcgattcccaatggctgggggacagagtcatcaccaccagcacccgaacctgggccctgcccacctacaacaatcacctctacaagcaaatctccaacagcacatctggaggatcttcaaatgacaacgcctacttcggctacagcaccccctgggggtattttgacttcaacagattccactgccacttctcaccacgtgactggcagcgactcatcaacaactggggattccggcctaagcgactcaacttcaagctcttcaacattcaggtcaaagaggttacggacaacaatggagtcaagaccatcgccaataaccttaccagcacggtccaggtcttcacggactcagactatcagctcccgtacgtgctcgggtcggctcacgagggctgcctcccgccgttcccagcggacgttttcatgattcctcagtacgggtatctgacgcttaatgatggaagccaggccgtgggtcgttcgtccttttactgcctggaatatttcccgtcgcaaatgctaagaacgggtaacaacttccaattcagctacgagtttgagaacgtacctttccatagcagctacgctcacagccaaagcctggaccgactaatgaatccactcatcgaccaatacttgtactatctctcaaagactattaacggttctggacagaatcaacaaacgctaaaattcagtgtggccggacccagcaacatggctgtccagggaagaaactacatacctggacccagctaccgacaacaacgtgtctcaaccactgtgactcaaaacaacaacagcgaatttgcttggcctggagcttcttcttgggctctcaatggacgtaatagcttgatgaatcctggacctgctatggccagccacaaagaaggagaggaccgtttctttcctttgtctggatctttaatttttggcaaacaaggaactggaagagacaacgtggatgcggacaaagtcatgataaccaacgaagaagaaattaaaactactaacccggtagcaacggagtcctatggacaagtggccacaaaccaccagagtgcccaagcacaggcgcagaccggctgggttcaaaaccaaggaatacttccgggtatggtttggcaggacagagatgtgtacctgcaaggacccatttgggccaaaattcctcacacggacggcaactttcacccttctccgctgatgggagggtttggaatgaagcacccgcctcctcagatcctcatcaaaaacacacctgtacctgcggatcctccaacggccttcaacaaggacaagctgaactctttcatcacccagtattctactggccaagtcagcgtggagatcgagtgggagctgcagaaggaaaacagcaagcgctggaacccggagatccagtacacttccaactattacaagtctaataatgttgaatttgctgttaatactgaaggtgtatatagtgaaccccgccccattggcaccagatacctgactcgtaatctg

SEQ ID NO: 610 - DNA, 2208 bp, Artificial Sequence
  Description of Artificial Sequence: Synthetic polynucleotide
atggctgccgatggttatcttccagattggctcgaggacaaccttagtgaaggaattcgcgagtggtgggctttgaaacctggagcccctcaacccaaggcaaatcaacaacatcaagacaacgctcgaggtcttgtgcttccgggttacaaataccttggacccggcaacggactcgacaagggggagccggtcaacgcagcagacgcggcggccctcgagcacgacaaggcctacgaccagcagctcaaggccggagacaacccgtacctcaagtacaaccacgccgacgccgagttccaggagcggctcaaagaagatacgtcttttgggggcaacctcgggcgagcagtcttccaggccaaaaagaggcttcttgaacctcttggtctggttgaggaagcggctaagacggctcctggaaagaagaggcctgtagagcagtctcctcaggaaccggactcctccgcgggtattggcaaatcgggtgcacagcccgctaaaaagagactcaatttcggtcagactggcgacacagagtcagtcccagaccctcaaccaatcggagaacctcccgcagccccctcaggtgtgggatctcttacaatggcttcaggtggtggcgcaccagtggcagacaataacgaaggtgccgatggagtgggtagttcctcgggaaattggcattgcgattcccaatggctgggggacagagccatcaccaccagcacccgaacctgggccctgcccacctacaacaatcacctctacaagcaaatctccaacagcacatctggaggatcttcaaatgacaacgcctacttcggctacagcaccccctgggggtattttgacttcaacagattccactgccacttctcaccacgtgactggcagcggctcatcaacaacaactggggattccggcctaagcgactcaacttcaagctcttcaacattcaggtcaaagaggttacggacaacaatggagtcaagaccatcgccaataaccttaccagcacggtccaggtcttcacggactcagactatcagctcccgtacgtgctcgggtcggctcacgagggctgcctcccgccgttcccagcggacgttttcatgattcctcagtacgggtatctgacgcttaatgatggaagccaggccgtgggtcgttcgtccttttactgcctggaatatttcccgtcgcaaatgctaagaacgggtaacaacttccagttcagctacgagtttgagaacgtacctttccatagcagctacgctcacagccaaagcctggaccgactaatgaatccactcatcgaccaatacttgtactatctctcaaagactattaacggttctggacagaatcaacaaacgctaaaattcagtgtggccggacccagcaacatggctgtccagggaagaaactacatacctggacccagctaccgacaacaacgtgtctcaaccactgtgactcaaaacaacaacagcgaatttgcttggcctggagcttcttcttgggctctcaatggacgtaatagcttgatgaatcctggacctgctatggccagccacaaagaaggagaggaccgtttctttcctttgtctggatctttaatttttggcaaacaaggaactggaagagacaacgtggatgcggacaaagtcatgacaaccaacgaagaagaaattaaaactactaacccggtagcaacggagtcctatggacaagtggccacaaaccaccagagtgcccaagcacaggcgcagaccggctgggttcaaaaccaaggaatacttccgggtatggtttggcaggacagagatgtgtacctgcaaggacccatttgggccaaaattcctcacacggacggcaactttcacccttctccgctgatgggagggtttggaatgaagcacccgcctcctcagatcctcatcaaaaacacacctgtacctgcggatcctccaacggccttcaacaaggacaagctgaactctttcatcacccagtattctactggccaagtcagcgtggagatcgagtgggagctgcagaaggaaaacagcaagcgctggaacccggagatccagtacacttccaactattacaagtctaataatgttgaatttgctgttaatactgaaggtgtatatagtgaaccccgccccattggcaccagatacctgactcgtaatctg

SEQ ID NO: 611 - DNA, 2208 bp, Artificial Sequence
  Description of Artificial Sequence: Synthetic polynucleotide
atggctgccgatggttatcttccagattggctcgaggacaaccttagtgaaggaattcgcgagtggtgggctttgaaacctggagcccctcaacccaaggcaaatcaacaacatcaagacaacgctcgaggtcttgtgcttccgggttacaaataccttggacccggcaacggactcgacaagggggagccggtcaatgcagcagacgcggcggccctcgagcacgacaaggcctacgaccagcagctcaaggccggagacaacccgtacctcaagtacaaccacgccgacgccgagttccaggagcggctcaaagaagatacgtcttttgggggcaacctcgggcgagcagtcttccagaccaaaaagaggcttcttgaacctcttggtctggttgaggaagcggctaagacggctcctggaaagaagaggcctgtagagcagtctcctcaggaaccgggctcctccgcgggtattggcaaatcgggtgcacagcccgctaaaaagagactcaatttcggtcagactggcgacacagagtcagtcccagaccctcaaccaatcggagaacctcccgcagccccctcaggtgtgggatctcttacaatggcttcaggtggtggcgcaccagtggcagacaataacgaaggtgccgatggagtgggtagttcctcgggaaattggcattgcgattcccaatggctgggggacagagtcatcaccaccagcacccgaacctgggccctgcccacctacaacaatcacctctacaagcaaatctccaacagcacatctggaggatcttcaaatgacaacgcctacttcggctacagcaccccctgggggtattttgacttcaacagattccactgccacttctcaccacgtgactggcagcgactcatcaacaacaactggggattccggcctaagcgactcaacttcaagctcttcaacattcaggtcaaagaggttacggacaacaatggagtcaagaccatcgccaataaccttaccagcacggtccaggtcttcacggactcagactatcagctcccgtacgtgctcgggtcggctcacgagggctgcctcccgccgttcccagcggacgttttcatgattcctcagtacgggtatctgacgcttaatgatggaagccaggccgtgggtcgttcgtccttttactgcctggaatatttcccgtcgcaaatgctaagaacgggtaacaacttccagttcagctacgagtttgagaacgtacctttccatagcagctacgctcacagccaaagcctggaccgactaatgaatccactcatcgaccaatacttgcactatctctcaaagactattaacggttctggacagaatcaacaaacgctaaaattcagtgtggccggacccagcaacatggctgtccagggaagaaactacatacctggacccagctaccgacaacaacgtgtctcaaccactgtgactcaaaacaacaacagcgaatttgcttggcctggagcttcttcttgggctctcaatggacgtaatagcttgatgaatcctggacctgctatggccagccacaaagaaggagaggaccgtttctttcctttgtctggatctttaatttttggcaaacaaggaactggaagagacaacgtggatgcggacaaagtcatgataaccaacgaagaagaaattaaaactactaacccggtagcaacggagtcctatggacaagtggccacaaaccaccagagtgcccaagcacaggcgcagaccggctgggttcaaaaccaaggaatacttccgggtatggtttggcaggacagagatgtgtacctgcaaggacccatttgggccaaaattcctcacacggacggcaactttcacccttctccgctgatgggagggtttggaatgaagcacccgcctcctcagatcctcatcaaaaacacacctgtacctgcggatcctccaacggccttcaacaaggacaagctgaactctttcatcacccagtattctactggccaagtcagcgtggagatcgagtgggagctgcagaaggaaaacagcaagcgctggaacccggagatccagtacacttccaactattacaagtctaataatgttgaatttgctgttaatactgaaggtgtatatagtgaaccccgccccattggcaccagatacctgactcgtaatctg

SEQ ID NO: 612 - DNA, 2208 bp, Artificial Sequence
  Description of Artificial Sequence: Synthetic polynucleotide
atggctgccgatggttattttccagattggctcgaggacaaccttagtgaaggaattcgcgagtggtgggctttgaaacctggagcccctcaacccaaggcaaatcaacaacatcaagacaacgctcgaggtcttgtgcttccgggttacaaataccttggacccggcaacggactcgacaagggggagccggtcaacgcagcagacgcggcggccctcgagcacgacaaggcctacgaccagcagctcaaggccggagacaacccgtacctcaagtacaaccacgccgacgccgagttccaggagcggctcaaagaagatacgtcttttgggggcaacctcgggcgagcagtcttccaggccaaaaagaggcttcttgaacctcttggtctggttgaggaagcggctaagacggctcctggaaagaagaggcctgtagagcagtctcctcaggaaccggactcctccgcgggtattggcaaatcgggtgcacagcccgctaaaaagagactcaatttcggtcagactggcgacacagagtcagtcccagaccctcaaccaatcggagaatctcccgcagccccctcaggtgtgggatctcttacaatggcttcaggtggtggcgcaccagtggcagacaataacgaaggtgccgatggagtgggtagttcctcgggaaattggcattgcgattcccaatggctgggggacagagtcatcaccaccagcacccgaacctgggccctgcccacctacaacaatcacctctacaagcaaatctccaacagcacatctggaggatcttcaaatgacaacgcctacttcggctacagcaccccctgggggtattttgacttcaacagattccactgccacttctcaccacgtgactggcagcgactcatcaacaacaactggggattccggcctaagcgactcaacttcaagctcttcaacattcaggtcaaagaggttacggacaacaatggagtcaagaccatcgccaataaccttaccagcacggtccaggtcttcacggactcagactatcagctcccgtacgtgctcgggtcggctcacgagggctgcctcccgccgttcccagcggacgttttcatgattcctcagtacgggtatctgacgcttaatgatggaagccaggccgtgggtcgttcgtccttttactgcctggaatatctcccgtcgcaaatgctaagaacgggtaacaacttccagttcagctacgagtttgagaacgtacctttccatagcagctacgctcacagccaaagcctggaccgactaatgaatccactcatcgaccaatacttgcactatctctcaaagactattaacggttctggacagaatcaacaaacgctaaaattcagtgtggccggacccagcaacatggctgtccagggaagaaactacatacctggacccagctaccgacaacaacgtgtctcaaccactgtgactcaaaacaacaacagcgaatttgcttggcctggagcttcttcttgggctctcaatggacgtaatagcttgatgaatcctggacctgctgtggccagccacaaagaaggagaggaccgtttctttcctttgtctggatctttaatttttggcaaacaaggaactggaagagacaacgtggatgcggacaaagtcatgataaccaacgaagaagaaattaaaactactaacccggtagcaacggagtcctatggacaagtggccacaaaccaccagagtgcccaagcacaggcgcagaccggctgggttcaaaaccaaggaatacttccgggtatggtttggcaggacagagatgtgtacctgcaaggacccatttgggccaaaattcctcacacggacggcaactttcacccttctccgctgatgggagggtttggaatgaagcacccgcctcctcagatcctcatcaaaaacacacctgtacctgcggatcctccaacggccttcaacaaggacaagctgaactctttcatcacccagtattctactggccaagtcagcgtggagatcgagtgggagctgcagaaggaaaacagcaagcgctggaacccggagatccagtacacttccaactattacaagtctaataatgttgaatttgctgttaatactgaaggtgtatatagtgaaccccgccccattggcaccagatacctgactcgtaatctg

SEQ ID NO: 613 - DNA, 2208 bp, Artificial Sequence
  Description of Artificial Sequence: Synthetic polynucleotide
atggctgccgatggttatcttccagattggctcgaggacaaccttagtgaaggaattcgcgagtggtgggctttgaaacctggagcccctcaacccaaggcaaatcaacaacatcaagacaacgctcgaggtcttgtgcttccgggttacaaataccttggacccggcaacggactcgacaagggggagccggtcaacgcagcagacgcggcggccctcgagcacgacaaggcctacgaccagcagctcaaggccggagacaacccgtacctcaagtacaaccacgccgacgccgagttccaggagcggctcaaagaagatacgtcttttgggggcaacctcgggcgagcagtcttccaggccaaaaagaggcttcttgaacctcttggtccggttgaggaagcggctaagacggctcctggaaagaagaggcctgtagagcagtctcctcaggaaccggactcctccgcgggtattggcaaatcgggtgcacagcccgctaaaaagagactcaatttcggtcagactggcgacacagagtcagtcccagaccctcaaccaatcggagaacctcccgcagccccctcaggtgtgggatctcttacaatggcttcaggtggtggcgcaccagtggcagacaataacgaaggtgccgatggagtgggtagttcctcgggaaattggcattgcgattcccaatggctgggggacagagtcatcaccaccagcacccgaacctgggccctgcccacctacaacaatcacctctacaagcaaatctccaacagcacatctggaggatcttcaaatgacaacgcctacttcggctacagcaccccctgggggtattttgacttcaacagattccactgccacttctcaccacgtgactggcagcgactcatcaacaacaactggggattccggcctaagcgactcaacttcaagctcttcaacattcaggtcaaagaggttacggacaacaatggagtcaagaccatcgccaataaccttaccagcacggtccaggtcttcacggactcagactatcagctcccgtacgtgctcgggtcggctcacgagggctgcctcccgccgttcccagcggacgttttcatgattcctcagtacgggtatctgacgcttaatgatggaagccaggccgtgggtcgttcgtccttttactgcctggaatatttcccgtcgcaaatgctaagaacgggtaacaacttccagttcagctacgagtttgagaacgtacctttccatagcagctacgctcacagccaaagcctggaccgactaatgaatccactcatcgaccaatacttgtactatctctcaaagactattaacggttctggacagaatcaacaaacgctaaaattcagtgtggccggacccagcaacatggctgtccagggaagaaactacatacctggacccagctaccgacaacaacgtgtctcaaccactgtgactcaaaacaacaacagcgaatttgcttggcctggagcttcttcttgggctctcaatggacgtaatagcttgatgaatcctggacctgctatggccagccacaaagaaggagaggaccgtttctttcctttgtctggatctttaatttttggcaaacaaggaactggaagagacaacgtggatgcggacaaagtcatgataaccaacgaagaagaaattaaaactactaacccggtagcaacggagtcctatggacaagcggccacaaaccaccagagtgcccaagcacaggcgcagaccggctgggttcaaaaccaaggaatacttccgggtatggtttggcaggacagagatgtgtacctgcaaggacccatttgggccaaaattcctcacacggacggcaactttcacccttctccgctgatgggagggtttggaatgaagcacccgcctcctcagatcctcatcaaaaacacacctgtacctgcggatcctccaacggccttcaacaaggacaagctgaactctttcatcacccagtattctactggccaagtcagcgtggagatcgagtgggagctgcagaaggaaaacagcaagcgctggaacccggagatccagtacacttccaactattacaagtctaataatgttgaatttgctgttaatactgaaggtgtatatagtgaaccccgccccattggcaccagatacctgactcgtaatctg

SEQ ID NO: 614 - DNA, 2208 bp, Artificial Sequence
  Description of Artificial Sequence: Synthetic polynucleotide
atggctgccgatggttatcttccagattggctcgaggacaaccttagtgaaggaattcgcgagtggtgggctttgaaacctggagcccctcaacccaaggcaaatcaacaacatcaagacaacgctcggggtcttgtgcttccgggttacaaataccttggacccggcaacggactcgacaagggggagccggtcaacgcagcagacgcggcggccctcgagcacgacaaggcctacgaccagcagctcaaggccggagacaacccgtacctcaagtacaaccacgccgacgccgagttccaggagcggctcaaagaagatacgtcttttgggggcaacctcgggcgagcagtcttccaggccaaaaagaggcttcttgaacctcttggtccggttgaggaagcggctaagacggctcctggaaagaagaggcctgtagagcagtctcctcaggaaccggactcctccgcgggtattggcaaatcgggtgcacagcccgctaaaaagagactcaatttcggtcagactggcgacacagagtcagtcccagaccctcaaccaatcggagaacctcccgcagccccctcaggtgtgggatctcttacaatggcttcaggtggtggcgcaccagtggcagacaataacgaaggtgccgatggagtgggtagttcctcgggaaattggcattgcgattcccaatggctgggggacagagtcatcaccaccagcacccgaacctgggccctgcccacctacaacaatcacctctacaagcaaatctccaacagcacatctggaggatcttcaaatgacaacgcctacttcggctacagcaccccctgggggtattttgacttcaacagattccactgccacttctcaccacgtgactggcggcgactcatcaacaacaactggggattccggcctaagcgactcaacttcaagctcttcaacattcaggtcaaagaggttacggacaacaatggagtcaagaccatcgccaataaccttaccagcacggtccaggtcttcacggactcagactatcagctcccgtacgtgctcgggtcggctcacgagggctgcctcccgccgttcccagcggacgttttcatgattcctcagtacgggtatctgacgcttaatgatggaagccaggccgtgggtcgttcgtccttttactgcctggaatatttcccgtcgcaaatgctaagaacgggtaacaacttccagttcagctacgagtttgagaacgtacctttccatagcagctacgctcacagccaaagcctggaccgactaatgaatccactcatcgaccaatacttgtactatctctcaaagactattaacggttctggacagaatcaacaaacgctaaaattcagtgtggccggacccagcaacatggctgtccagggaagaaactacatacctggacccagctaccgacaacaacgtgtctcaaccactgtgactcaaaacaacaacagcgaatttgcttggcctggagcttcttcttgggctctcaatggacgtaatagcttgatgaatcctggacctgctatggccagccacaaagaaggagaggaccgtttctttcctttgtctggatctttaatttttggcaaacaaggaactggaagagacaacgtggatgcggacaaagtcatgataaccaacgaagaagaaattaaaactactaacccggtagcaacggagtcctatggacaagtggccacaaaccaccagagtgcccaagcacaggcgcagaccggctgggttcaaaaccaaggaatacttccgggtatggtttggcaggacagagatgtgtacctgcaaggacccatttgggccaaaattcctcacacggacggcaactttcacccttctccgctgatgggagggtttggaatgaagcacccgcctcctcagatcctcatcaaaaacacacctgtacctgcggatcctccaacggccttcaacaaggacaagctgaactctttcatcacccagtattctactggccaagtcagcgtggagatcgagtgggagctgcagaaggaaaacagcaagcgctggaacccggagatccagtacacttccaactattacaagtctaataatgttgaatttgctgttaatactgaaggtgtatatagtgaaccccgccccattggcaccagatacctgactcgtaatctg

SEQ ID NO: 615 - DNA, 2208 bp, Artificial Sequence
  Description of Artificial Sequence: Synthetic polynucleotide
atggctgccgatggttatcttccagattggctcgaggacaaccttagtgaaggaattcgcgagtggtgggctttgaaacctggagcccctcaacccaaggcaaatcaacaacatcaagacaacgctcgaggtcttgtgcttccgggttacaaataccttggacccggcaacggactcgacaagggggagccggtcaacgcagcagacgcggcggccctcgagcacgacaaggcctacgaccagcagctcaaggccggagacaacctgtacctcaagtacaaccacgccgacgccgagttccaggagcggctcaaagaagatacgtcttttgggggcaacctcgggcgagcagtcttccaggccaaaaagaggcttcttgaacctcttggtctggttgaggaagcggctaagacggctcctggaaagaagaggcctgtagagcagtctcctcaggaaccggactcctccgcgggtattggcaaatcgggtgcacagcccgctaaaaagagactcaatttcggtcagactggcgacacagagtcagtcccagaccctcaaccaatcggagaacctcccgcagccccctcaggtgtgggatctcttacaatggcttcaggtggtggcgcaccagtggcagacaataacgaaggtgccgatggagtgggtagttcctcgggaaattggcattgcgattcccaatggctgggggacagagtcatcaccaccagcacccgaacctgggccctgcccacctacaacaatcacctctacaagcaaatctccaacagcacatctggaggatcttcaaatgacaacgcctacttcggctacagcaccccctgggggtattttgacttcaacagattccactgccacttctcaccacgtgactggcagcgactcatcaacaacaactggggattccggcctaagcgactcaacttcaagctcttcaacattcaggtcaaagaggttacggacaacaatggagtcaagaccatcgccaataaccttaccagcacggtccaggtcttcacggactcagactatcagctcccgtacgtgctcgggtcggctcacgagggctgcctcccgccgttcccagcggacgttttcatgattcctcagtacgggtatctgacgcttaatgatggaagccaggccgtgggtcgttcgtccttttactgcctggaatatttcccgtcgcaaatgctaagaacgggtaacaacttccagttcagctacgagtttgagaacgtacctttccatagcagctacgctcacagccaaagcctggaccgactaatgaatccactcatcgaccaatacttgcactatctctcaaagactattaacggttctggacagaatcaacaaacgctaaaattcagtgtggccggacccagcaacatggctgtccagggaagaaactacatacctggacccagctaccgacaacaacgtgtctcaaccactgtgactcaaaacaacaacagcgaatttgcttggcctggagcttcttcttgggctctcaatggacgtaatagcttgatgaatcctggacctgctatggccagccacaaagaaggagaggaccgtttctttcctttgtctggatctttaatttttggcaaacaaggaactggaagagacaacgtggatgcggacaaagtcatgataaccaacgaagaagaaattaaaactactaacccggtagcaacggagtcctatggacaagtggccacaaaccaccagagtgcccaagcacaggcgcagaccggctgggttcaaaaccaaggaatacttccgggtatggtttggcaggacagagatgtgtacctgcaaggacccatttgggccaaaattcctcacacggacggcaactttcacccttctccgctgatgggagggtttggaatgaagcacccgcctcctcagatcctcatcaaaaacacacctgtacctgcggatcctccaacggccttcaacaaggacaagctgaactctttcatcacccagtattctactggccaagtcagcgtggagatcgagtgggagctgcagaaggaaaacagcaagcgctggaacccggagatccagtacacttccaactattacaagtctaataatgttgaatttgctgttaatactgaaggtgtatatagtgaaccccgccccattggcaccagatacctgactcgtaatctg

SEQ ID NO: 616 - DNA, 2208 bp, Artificial Sequence
  Description of Artificial Sequence: Synthetic polynucleotide
atggctgccgatggttatcttccagattggctcgaggacaaccttagtgaaggaattcgcgagtggtgggctttgaaacctggagcccctcaacccaaggcaaatcaacaacatcaagacaacgctcgaggtcttgtgcttccgggttacaaataccttggacccggcaacggactcgacaagggggagccggtcaacgcagcagacgcggcggccctcgagcacgacaaggcctacgaccagcagctcaaggccggagacaacccgtacctcaagtacaaccacgccgacgccgagttccaggagcggctcaaagaagatacgtcttttgggggcaacctcgggcgagcagtcttccaggccaaaaagaggcttcttgaacctcttggtctggttgaggaagcggctaagacggctcctggaaagaagaggcctgtagagcagtctcctcaagaaccggactcctccgcgggtattggcaaatcgggtgcacagcccgctaaaaagagactcaatttcggtcagactggcgacacagagtcagtcccagaccctcaaccaatcggagaacctcccgcagccccctcaggtgtgggatctcttacaatggcttcaggtggtggcgcaccagtggcagacaataacgaaggtgccgatggagtgggtagttcctcgggaaattggcattgcgattcccaatggctgggggacagagtcatcaccaccagcacccgaacctgggccctgcccacctacaacaatcacctctacaagcaaatctccaacagcacatctggaggatcttcaaatgacaacgcctacttcggctacagcaccccctgggggtattttgacttcaacagattccactgccacttctcaccacgtgactggcagcgactcatcaacaacaactggggattccggcctaagcgactcaacttcaagctcttcaacattcaggtcaaagaggttacggacaacaatggagtcaagaccatcgccaataaccttaccagcacggtccaggtcttcacggactcagactatcagctcccgtacgtgctcgggtcggctcacgagggctgcctcccgccgttcccagcggacgttttcatgattcctcagtacgggtatctgacgcttaatgatggaagccaggccgtgggtcgttcgtccttttactgcctggaatatttcccgtcgcaaatgctaagaacgggtaacaacttccagttcagctacgagtttgagaacgtacctttccatagcagctacgctcacagccaaagcctggaccgactaatgaatccactcatcgaccaatacttgcactatctctcaaagactattaacggttctggacagaatcaacaaacgctaaaattcagtgtggccggacccagcaacatggctgtccagggaagaaactacatacctggacccagctaccgacaacaacgtgtctcaaccactgtgactcaaaacaacaacagcgaatttgcttggcctggagcttcttcttgggctctcaatggacgtaatagcttgatgaatcctggacctgctatggccagccacaaagaaggagaggaccgtttctttcctttgtctggatctttaatttttggcaaacaaggaactggaagagacaacgtggatgcggacaaagtcatgataaccaacgaagaagaaattaaaactactaacccggtagcaacggagtcctatggacaagtggccacaaaccaccagagtgcccaagcacaggcgcagaccggctgggttcaaaaccaaggaatacttccgggtatggtttggcaggacagagatgtgtacctgcaaggacccatttgggccaaaattcctcacacggacggcaactttcacccttctccgctgatgggagggtttggaatgaagcacccgcctcctcagatcctcatcaaaaacacacctgtacctgcggatcctccaacggccttcaacaaggacaagctgaactctttcatcacccagtattctactggccaagtcagcgtggagatcgagtgggagctgcagaaggaaaacagcaagcgctggaacccggagatccagtacacttccaactattacaagtctaataatgttgaatttgctgttaatactgaaggtgtatatagtgaaccccgccccattggcaccagatacctgactcgtaatctg

SEQ ID NO: 617 - DNA, 2208 bp, Artificial Sequence
  Description of Artificial Sequence: Synthetic polynucleotide
  misc_feature (1325)..(1325): n is a, c, t, or g
atggctgccgatggttatcttccagattggctcgaggacaaccttagtgaaggaattcgcgagtggtgggctttgaaacctggagcccctcaacccaaggcaaatcaacaacatcaagacaacgctcgaggtcttgtgcttccgggttacaaataccttggacccggcaacggactcgacaagggggagccggtcaacgcagcagacgcggcggccctcgagcacgacaaggcctacgaccagcagctcaaggccggagacaacccgtacctcaagtacaaccacgccgacgccgagttccaggagcggctcaaagaagatacgtcttttgggggcaacctcgggcgagcagtcttccaggccaaaaagaggcttcttgaacctcttggtctggttgaggaagcggctaagacggctcctggaaagaagaggcctgtagagcagtctcctcaggaaccggactcctccgcgggtattggcaaatcgggtgcacagcccgctaaaaagagactcaatttcggtcagactggcgacacagagtcagtcccagaccctcaaccaatcggagaacctcccgcagccccctcaggtgtgggatctcttacaatggcttcaggtggtggcgcaccagtggcagacaataacgaaggtgccgatggagtgggtagttcctcgggaaattggcattgcgattcccaatggctgggggacagagtcatcaccaccagcacccgaacctgggccctgcccacctacaacaatcacctctacaagcaaatctccaccagcacatctggaggatcttcaaatgacaacgcctacttcggctacagcaccccctgggggtattttgacttcaacagattccactgccacttctcaccacgtgactggcagcgactcatcaacaacaactggggattccggcctaagcgactcaacttcaagctcttcaacattcaggtcaaagaggttacggacaacaatggagtcaagaccatcgccaataaccttaccagcacggtccaggtcttcacggactcagactatcagctcccgtacgtgctcgggtcggctcacgagggctgcctcccgccgttcccagcggacgttttcatgattcctcagtacgggtatctgacgcttaatgatggaagccaggccgtgggtcgttcgtccttttactgcctggaatatttcccgtcgcaaatgctaagaacgggtaacaacttccagttcagctacgagtttgagaacgtacctttccatagcagctacgctcacagccaaagcctggaccgactaatgaatccactcatcgaccnatacttgcactatctctcaaagactattaacggttctggacagaatcaacaaacgctaaaattcagtgtggccggacccagcaacatggctgtccagggaagaaactacatacctggacccagctaccgacaacaacgtgtctcaaccactgtgactcaaaacaacaacagcgaatttgcttggcctggagcttcttcttgggctctcaatggacgtaatagcttgatgaatcctggacctgctatggccagccacaaagaaggagaggaccgtttctttcctttgtctggatctttaatttttggcaaacaaggaactggaagagacaacgtggatgcggacaaagtcatgataaccaacgaagaagaaattaaaactactaacccggtagcaacggagtcctatggacaagtggccacaaaccaccagagtgcccaagcacaggcgcagaccggctgggttcaaaaccaaggaatacttccggatatggtttggcaggacagagatgtgtacctgcaaggacccatttgggccaaaattcctcacacggacggcaactttcacccttctccgctgatgggagggtttggaatgaagcacccgcctcctcagatcctcatcaaaaacacacctgtacctgcggatcctccaacggccttcaacaaggacaagctgaactctttcatcacccagtattctactggccaagtcagcgtggagatcgagtgggagctgcagaaggaaaacagcaagcgctggaacccggagatccagtacacttccaactattacaagtctaataatgttgaatttgctgttaatactgaaggtgtatatagtgaaccccgccccattggcaccagatacctgactcgtaatctg

SEQ ID NO: 618 - DNA, 2208 bp, Artificial Sequence
  Description of Artificial Sequence: Synthetic polynucleotide
atggctgccgatggttatcttccagattggctcgaggacaaccttagtgaaggaattcgcgagtggtgggctttgaaacctggagcccctcaacccaaggcaaatcaacaacatcaagacaacgctcgaggtcttgtgcttccgggttacaaataccttggacccggcaacggactcgacaagggggagccggtcaacgcagcagacgcggcggccctcgagcacgacaaggcctacgaccagcagctcaaggccggagacaacccgtacctcaagtacaaccacgccgacgccgagttccaggagcggctcaaagaagatacgtcttttgggggcaacctcgggcgagcagtcttccaggccaaaaagaggcttcttgaacctcttggtctggttgaggaagcggctaagacggctcctggaaagaagaggcctgtagagcagtctcctcaggaaccggactcctccgcgggtattggcaaatcgggtgcacagcccgctaaaaagagactcaatttcggtcagactggcgacacagagtcagtcccagaccctcaaccaatcggagaacctcccgcagccccctcaggtgtgggatctcttacaatggcttcaggtggtggcgcaccagtggcagacaataacgaaggtgccgatggagtgggtagttcctcgggaaattggcattgcgattcccaatggctgggggacagagtcatcaccaccagcacccgaacctgggccctgcccacctacaacaatcacctctacaagcaaatctccaacagcacatctggaggatcttcaaatgacaacgcctacttcggctacagcaccccctgggggtattttgacttcaacagattccactgccacttctcaccacgtgactggcagcgactcatcaacaacaactggggattccggcctaagcgactcaacttcaagctcttcaacattcaggtcaaagaggttacggacaacaatggagtcaagaccatcgccaataaccttaccagcacggtccaggtcttcacggactcagactatcagctcccgtacgtgctcgggtcggctcacgagggctgcctcccgccgttcccagcggacgttttcatgattcctcagtacgggtatctgacgcttaatgatggaagccaggccgtgggtcgttcgtccttttactgcctggaatatttcccgtcgcaaatgctaagaacgggtaacaacttccagttcagctacgagtttgagaacgtacctttccatagcagctacgctcacagccaaagcctggaccgactaatgaatccactcatcgaccaatacttgcactatctctcaaagactattaacggttctggacagaatcaacaaacgctaaaattcagtgtggccggacccagcaacatggctgtccagggaagaaactacatacctggacccagctaccgacaacaacgtgtctcaaccactgtgactcaaaacaacaacagcgaatttgcttggcctggagcttcttcttgggctctcaatggacgtaatagcttgatgaatcctggacctgctatggccagctacaaagaaggagaggacagtttctttcctttgtctggatctttaatttttggcaaacaaggaactggaagagacaacgtggatgcggacaaagtcatgataaccaacgaagaagaaattaaaactactaacccggtagcaacggagtcctatggacaagtggccacaaaccaccagagtgcccaagcacaggcgcagaccggctgggttcaaaaccaaggaatacttccgggtatggtttggcaggacagagatgtgtacctgcaaggacccatttgggccaaaattcctcacacggacggcaactttcacccttctccgctgatgggagggtttggaatgaagcacccgcctcctcagaccctcatcaaaaacacacctgtacctgcggatcctccaacggccttcaacaaggacaagctgaactctttcatcacccagtattctactggccaagtcagcgtggagatcgagtgggagctgcagaaggaaaacagcaagcgctggaacccggagatccagtacacttccaactattacaagtctaataatgttgaatttgctgttaatactgaaggtgtatatagtgaaccccgccccattggcaccagatacctgactcgtaatctg

SEQ ID NO: 619 - DNA, 2208 bp, Artificial Sequence; identical to SEQ ID NO: 602
  Description of Artificial Sequence: Synthetic polynucleotide

SEQ ID NO: 620 - DNA, 2208 bp, Artificial Sequence
  Description of Artificial Sequence: Synthetic polynucleotide
atggctgccgatggttatcttccagattggctcgaggacaaccttagtgaaggaattcgcgagtggtgggctttgaaacctggagcccctcaacccagggcaaatcaacaacatcaagacaacgctcgaggtcttgtgcttccgggttacaaataccttggacccggcaacggactcgacaagggggagccggtcaacgcagccgacgcggcggccctcgagcacgacaaggcctacgaccagcagctcaaggccggagacaacccgtacctcaagtacaaccacgccgacgccgagttccaggagcggctcaaagaagatacgtcttttgggggcaacctcgggcgagcagtcttccaggccaaaaagaggcttcttgaacctcttggtctggttgaggaagcggctaagacggctcctggaaagaagaggcctgtagagcagtctcctcaggaaccggactcctccgcgggtattggcaaatcgggtgcacagcccgctaaaaagagactcaatttcggtcagactggcgacacagagtcagtcccagaccctcaaccaatcggagaacctcccgcagccccctcaggtgtgggatctcttacaatggcttcaggtggtggcgcaccagtggcagacaataacgaaggtgccgatggagtgggtagttcctcgggaaattggcattgcgattcccaatggctgggggacagagtcatcaccaccagcacccgaacctgggccctgcccacctacaacaatcacctctacaagcaaatctccaacagcacatctggaggatcttcaaatgacaacgcctacttcggctacagcaccccctgggggtattttgacttcaacagattccactgccacttctcaccacgtgactggcagcgactcatcaacaacaactggggattccggcctaagcgactcaacttcaagctcttcaacattcaggtcaaagaggttacggacaacaatggagtcaagaccatcgccaataaccttaccagcacggtccaggtcttcacggactcagactgtcagctcccgtacgtgctcgggtcggctcacgagggctgcctcccgccgttcccagcggacgttttcatgattcctcagtacgggtatctgacgcttaatgatggaagccaggccgtgggtcgttcgtccttttactgcctggaatatttcccgtcgcaaatgctaagaacgggtaacaacttccagttcagctacgagtttgagaacgtacctttccatagcagctacgctcacagccaaagcctggaccgactaacgaatccactcatcgaccaatacttgtactatctctcaaagactattaacggttctggacagaatcaacaaacgctaaaattcagtgtggccggacccagcaacatggctgtccagggaagaaactacatacctggacccagctaccgacaacaacgtgtctcaaccactgtgactcaaaacaacaacagcgaatttgcttggcctggagcttcttcttgggctctcaatggacgtaatagcttgatgaatcctggacctgctatggccagccacaaagaaggagaggaccgtttctttcctttgtctggatctttaatttttggcaaacaaggaactggaagagacaacgtggatgcggacaaagtcatgataaccaacgaagaagaaattaaaactactaacccggtagcaacggagtcccatggacaagtggccacaaaccaccagagtgcccaagcacaggcgcagaccggctgggttcaaaaccaaggaatacttccgggtatggtttggcaggacagagatgtgtacctgcaaggacccatttgggccaaaattcctcacacggacggcaactttcacccttctccgctgatgggagggtttggaatgaagcacccgcctcctcagatcctcatcaaaaacacacctgtacctgcggatcctccaacggccttcaacaaggacaagctgaactctttcatcacccagtattctactggccaagtcagcgtggagatcgagtgggagctgcagaaggaaaacagcaagcgctggaacccggagatccagtacacttccaactattacaagtctaataatgttgaatttgctgttaatactgaaggtgtatatagtgaaccccgccccattggcaccagatacctgactcgtaatctg

SEQ ID NO: 621 - DNA, 2208 bp, Artificial Sequence
  Description of Artificial Sequence: Synthetic polynucleotide
atggctgccgatggttatcttccagattggctcgaggacaaccttagtgaaggaattcgcgagtggtgggctttgaaacctggagcccctcaacccaaggcaaatcaacaacatcaagacaacgctcgaggtcttgtgcttccgggttacaaataccttggacccggcaacggactcgacaagggggagccggtcaacgcagcagacgcggcggccctcgagcacgacaaggcctacgaccagcagctcaaggccggagacaacccgtacctcaagtacaaccacgccgacgccgagttccaggagcggctcaaagaagatacgtcttttgggggcaacctcgggcgagcagtcttccaggccaaaaagaggcttcttgaacctcttggtctggttgaggaagcggctaagacggctcctggaaagaagaggcctgtagagcagtctcctcaggaaccggactcctccgcgggtattggcaaatcgggtgcacagcccgctaagaagagactcaatttcggtcagactggcgacacagagtcagtcccagaccctcaaccaatcggagaacctcccgcagccccctcaggtgtgggatctcttacaatggcttcaggtggtggcgcaccagtggcagacaataacgaaggtgccgatggagtgggtagttcctcgggaaattggcattgcgattcccaatggctgggggacagagtcatcaccaccagcacccgaacctgggccctgcccacctacaacaatcacctctacaagcaaatctccaacagcacatctggaggatcttcaaatgacaacgcctacttcggctacagcaccccctgggggtattttgacttcaacagattccactgccacttctcaccacgtgactggcagcgactcatcaacaacaactggggattccggcctaagcgactcaacttcaagctcttcaacattcaggtcaaagaggttacggacaacaatggagtcaagaccatcgccaataaccttaccagcacggtccaggtcttcacggactcagactatcagctcccgtacgtgctcgggtcggctcacgagggctgcctcccgccgttcccagcggacgttttcatgattcctcagtacgggtatctgacgcttaatgatggaagccaggccgtgggtcgttcgtccttttactgcctggaatatttcccgtcgcaaatgctaagaacgggtaacaacttccagttcagctacgagtttgagaacgtacctttccatagcagctacgctcacagccaaagcctggaccgactaatgaatccacccatcgaccaatacttgtactatctctcaaagactattaacggttctggacagaatcaacaaacgctaaaattcagtgtggccggacccagcaacatggctgtccagggaagaaactacatacctggacccagctaccgacaacaacgtgtctcaaccactgtgactcaaaacaacaacagcgaatttgcttggcctggagcttcttcttgggctctcaatggacgtaatagcttgatgaatcctggacctgctatggccagccacaaagaaggagaggaccgtttctttcctttgtctggatctttaatttttggcaaacaaggaactggaagagacaacgtggatgcggacaaagtcatgataaccaacgaagaagaaattaaaactactaacccggtagcaacggagtcctatggacaagtggccacaaaccaccagagtgcccaagcacaggcgcagaccggctgggttcaaaaccaaggaatacttccgggtatggtttggcaggacagagatgtgtacctgcaaggacccatttgggccaaaattcctcacacggacggcaactttcacccttctccgctgatgggagggtttggaatgaagcacccgcctcctcagatcctcatcaaaaacacacctgtacctgcggatcctccaacggccttcaacaaggacaagctgaactctttcatcacccagtattctactggccaagtcagcgtggagatcgagtgggagctgcagaaggaaaacagcaagcgctggaacccggagatccagtacacttccaactattacaagtctaataatgttgaatttgctgttaatactgaaggtgtatatggtgaaccccgccccattggcaccagatacctgactcgtaatctg

SEQ ID NO: 622 - DNA, 2208 bp, Artificial Sequence
  Description of Artificial Sequence: Synthetic oligonucleotide
atggctgccgatggttatcttccagattggctcgaggacaaccttagtgaaggaattcgcgagtggtgggctttgaaacctggagcccctcaacccaaggcaaatcaacaacatcaagacaacgctcgaggtcttgtgcttccgggttacaaataccttggacccggcaacggactcgacaagggggagccggtcaacgcagcagacgcggcggccctcgagcacgacaaggcctacgaccagcagctcaaggccggagacaacccgtacctcaagtacaaccacgccgacgccgagttccaggagcggctcaaagaagatacgtcttttgggggcaacctcgggcgagcagtcttccaggccaaaaagaggcttcttgaacctcttggtctggttgaggaagcggctaagacggctcctggaaagaagaggcctgtagagcagtctcctcaggaaccggactcctccgcgggtattggcaaatcgggtgcacagcccgctaaaaagagactcaatttcggtcagactggcgacacagagtcagtcccagaccctcaaccaatcggagaacctcccgcagccccctcaggtgtgggatctcttacaatggcttcaggtggtggcgcaccagtggcagacaataacgaaggtgccgatggagtgggtagttcctcgggaaattggcattgcgattcccaatggctgggggacagagtcatcaccaccagcacccgaacctgggccctgcccacctacaacaatcacctctacaagcaaatctccaacagcacatctggaggatcttcaaatgacaacgcctacttcggctacagcaccccctgggggtattttgacttcaacagattccactgccacttctcaccacgtgaccggcagcgactcatcaacaacaactggggattccggcctaagcgactcaacttcaagctcttcaacattcaggtcaaagaggttacggacaacaatggagtcaagaccatcgccaataaccttaccagcacggtccaggtcttcacggactcagactatcagctcccgtacgtgctcgggtcggctcacgagggctgcctcccgccgttcccagcggacgttttcatgattcctcagtacgggtatctgacgcttaatgatggaagccaggccgtgggtcgttcgtccttttactgcctggaatatttcccgtcgcaaatgctaagaacgggtaacaacttccagttcagctacgagtttgagaacgtacctttccatagcagctacgctcacagccaaagcctggaccgactaatgaatccactcatcgaccaatacttgtactatctctcaaagactattaacggttctggacagaatcaacaaacgctaaaattcagtgtggccggacccagcaacatggctgtccagggaagaaactacatacctggacccagctaccgacaacaacgtgtctcaaccactgtgactcaaaacaacaacagcgaatttgcttggcctggagcttcttcttgggctctcaatggacgtaatagcttgatgaatcctggacctgctatggccagccacaaagaaggagaggaccgtttctttcctttgtctggatctttaatttttggcaaacaaggaactggaagagacaacgtggatgcggacaaagtcatgataaccaacgaagaagaaattaaaactactaacccggtagcaacggagtcctatggacaagtggccacaaaccaccagagtgcccaagcacaggcgcagaccggctgggttcaaaaccaaggaatacttccgggtatggtttggcaggacagagatgtgtacctgcaaggacccatttgggccaaaattcctcacacggacggcaactttcacccttctccgctgatgggagggtttggaatgaagcacccgcctcctcagatcctcatcaaaaacacacctgtacctgcggatcctccaacggccttcaacaaggacaagctgaactctttcatcacccagtattctactggccaagtcagcgtggagatcgagtgggagctgcagaaggaaaacagcaagcgctggaacccggagatccagtacacttccaactattacaagtctaataatgttgaatttgctgttaatactgaaggtgtatatagtgaaccccgccccattggcaccagatacctgactcgtaatctg

SEQ ID NO: 623 - DNA, 2208 bp, Artificial Sequence
  Description of Artificial Sequence: Synthetic polynucleotide
atggctgccgatggttatcttccagattggctcgaggacaaccttagtgaaggaattcgcgagtggtgggctttgaaacctggagcccctcaacccaaggcaaatcaacaacatcaagacaacgctcgaggtcttgtgcttccgggttacaaataccttggacccggcaacggactcgacaagggggagccggtcaacgcagcagacgcggcagccctcgagcacgacaaggcctacgaccagcagctcaaggccggagacaacccgtacctcaagtacaaccacgccgacgccgagttccaggagcggctcaaagaagatacgtcttttgggggcaacctcgggcgagcagtcttccaggccaaaaagaggcttcttgaacctcttggtctggttgaggaagcggctaagacggctcctggaaagaagaggcctgtagagcagtctcctcaggaaccggactcctccgcgggtattggcaaatcgggtgcacagcccgctaaaaagagactcaatttcggtcagactggcgacacagagtcagtcccagaccctcaaccaatcggagaacctcccgcagccccctcaggtgtgggatctcttacaatggcttcaggtggtggcgcaccagtggcagacaataacgaaggtgccgatggagtgggtagttcctcgggaaattggcattgcaattcccaatggctgggggacagagtcatcaccaccagcacccgaacctgggccctgcccacctacaacaatcacctctacaagcaaatctccaacagcacatctggaggatcttcaaatgacaacgcctacttcggctacagcaccccctgggggtattttgacttcaacagattccactgccacttctcaccacgtgactggcagcgactcatcaacaacaactggggattccggcctaagcgactcaacttcaagctcttcaacattcaggtcaaagaggttacggacaacaatggagtcaagaccatcgccaataaccttaccagcacggtccaggtcttcacggactcagactatcagctcccgtacgtgctcgggtcggctcacgagggctgcctcccgccgttcccagcggacgttttcatgattcctcagtacgggtatctgacgcttaatgatggaagccaggccgtgggtcgttcgtccttttactgcctggaatatttcccgtcgcaaatgctaagaacgggtaacaacttccagttcagctacgagtttgagaacgtacctttccatagcagctacgctcacagccaaagcctggaccgactaatgaatccactcatcgaccaatacttgtactatctctcaaagactattaacggttctggacagaatcaacaaacgctaaaattcagtgtggccggacccggcaacatggctgtccagggaagaaactacatacctggacccagctaccgacaacaacgtgtctcaaccactgtgactcaaaacaacaacagcgaatttgcttggcctggagcttcttcttgggctctcaatggacgtaatagcttgatgaatcctggacctgctatggccagccacaaagaaggagaggaccgtttctttcctttgtctggatctttaatttttggcaaacaaggaactggaagagacaacgtggatgcggacaaagtcatgataaccaacgaagaagaaattaaaactactaacccggtagcaacggagtcctatggacaagtggccacaaaccaccagagtgcccaagcacaggcgcagaccggctgggttcaaaaccaaggaatacttccgggtatggtttggcaggacagagatgtgtacctgcaaggacccatttgggccaaaattcctcacacggacggcaactttcacccttctccgctgatgggagggtttggaatgaagcacccgcctcctcagatcctcatcaagaacacacctgtacctgcggatcctccaacggccttcaacaaggacaagctgaactctttcatcacccagtattctactggccaagtcagcgtggagatcgagtgggagctgcagaaggaaaacagcaagcgctggaacccggagatccagtacacttccaactattacaagtctaataatgttgaatttgctgttaatactgaaggtgtatatagtgaaccccgccccattggcaccagatacctgactcgtaatctg

SEQ ID NO: 624 - DNA, 2208 bp, Artificial Sequence
  Description of Artificial Sequence: Synthetic polynucleotide
atggctgccgatggttatcttccagattggctcgaggacaaccttagtgaaggaattcgcgagtggtgggctttgaaacctggagcccctcaacccaaggcaaatcaacaacatcaagacaacgctcgaggtcttgtgcttccgggttacagataccttggacccggcaacggactcgacaagggggagccggtcaacgcagcagacgcggcggccctcgagcacgacaaggcctacgaccagcagctcaaggccggagacaacccgtacctcaagtacaaccacgccgacgccgagttccaggagcggctcaaagaagatacgtcttttgggggtaacctcgggcgagcagtcttccaggccaaaaagaggcttcttgaacctcttggtctggttgaggaagcggctaagacggctcctggaaagaagaggcctgtagagcagtctcctcaggaaccggactcctccgcgggtatcggcaaatcgggtgcacagcccgctaaaaagagactcaatttcggtcagactggcgacacagagtcagtcccagaccctcaaccaatcggagaacctcccgcagccccctcaggtgtgggatctcttacaatggcttcaggtggtggcgcaccagtggcagacaataacgaaggtgccgatggagtgggtagttcctcgggaaattggcattgcgattcccaatggctgggggacagagtcatcaccaccagcacccgaacctgggccctgcccacctacaacaatcacctctacaagcaaatctccaacagcacatctggaggatcttcaaatgacaacgcctacttcggctacagcaccccctgggggtattttgacttcaacagattccactgccacttctcaccacgtgactggcagcgactcatcaacaacaactggggattccggcctaagcgactcaacttcaagctcttcaacattcaggtcaaagaggttacggacaacaatggagtcaagaccgtcgccaataaccttaccagcacggtccaggtcttcacggactcagactatcagctcccgtacgtgctcgggtcggctcacgagggctgcctcccgccgttcccagcggacgttttcatgattcctcagtacgggtatctgacgcttaatgatggaagccaggccgtgggtcgttcgtccttttactgcctggaatatttcccgtcgcaaatgctaagaacgggtaacaacttccagttcagctacgagtttgagaacgtacctttccatagcagctacgctcacagccaaagcctggaccgactaatgaatccactcatcgaccaatacttgtactatctctcaaagactattaacggttctggacagaatcaacaaacgctaaaattcagtgtggccggacccagcaacatggctgtccagggaagaaactacatacctggacccagctaccgacaacaacgtgtctcaaccactgtgactcaaaacaacaacagcgaatttgcttggcctggagcttcttcttgggctctcaatggacgtaatagcttgatgaatcctggacctgctatggccagccacaaagaaggagaggaccgtttctttcctttgtctggatctttaatttttggcaaacaaggaactggaagagacaacgtggatgcggacaaagtcatgataaccaacgaagaagaaattaaaactactaacccggtagcaacggagtcctatggacaagtggccacaaaccaccagagtgcccaagcacaggcgcagaccggctgggttcaaaaccaaggaatacttccgggtatggtttggcaggacagagatgtgtacctgcaaggacccatttgggccaaaattcctcacacggacggcaactttcacccttctccgctgatgggagggtttggaatgaagcacccgcctcctcagatcctcatcaaaaacacacctgtacctgcggatcctccaacggccttcaacaaggacaagctgaactctttcatcacccagtattctactggccaagtcagcgtggagatcgagtgggagctgcagaaggaaaacagcaagcgctggaacccggagatccagtacacttccaactattacaagtctaataatgttgaatttgctgttaatactgaaggtgtatatagtggaccccgccccattggcaccagatacctgactcgtaatctg

SEQ ID NO: 625 - DNA, 2208 bp, Artificial Sequence
  Description of Artificial Sequence: Synthetic polynucleotide
atggctgccgatggttatcttccagattggctcgaggacaaccttagtgaaggaattcgcgagtggtgggctttgaaacctggagcccctcaacccaaggcaaatcaacaacatcaagacaacgctcgaggtcttgtgcttccgggttacaaataccttggacccggcaacggactcgacaagggggagccggtcaacgcagcagacgcggcggccctcgagcacgacaaggcctacgaccagcagctcaaggccggagacaacccgtacctcaagtacaaccacgccgacgccgagttccaggagcggctcaaagaagatacgtcttttgggggcaacctcgggcgagcagtcttccaggccaaaaagaggcttcttgaacctcttggtctggttgaggaagcggctaagacggctcctggaaagaagaggcctgtagagcagtctcctcaggaaccggactcctccgcgggtattggcaaatcgggtgcacagcccgctaaaaagagactcaatttcggtcagactggcgacacagagtcagtcccagaccctcaaccaatcggagaacctcccgcagccccctcaggtgtgggatctcttacaatggcttcaggtggtggcgcaccagtggcagacaataacgaaggtgccgatggagtgggtagttcctcgggaaattggcattgcgattcccaatggctgggggacagagtcatcaccaccagcacccgaacctgggccctgcccacctacaacaatcacctctacaagcaaatctccaacagcacatctggaggatcttcaaatgacaacgcctacttcggctacagcaccccctgggggtattttgacttcaacagattccactgccacttctcaccacgtgactggcagcgactcatcaacaacaactggggattccggcctaagcgactcaacttcaagctcttcaacattcaggtcaaagaggttacggacaacaatggagtcaagaccatcgccaataaccttaccagcacggtccaggtcttcacggactcagactatcagctcccgtacgtgctcgggtcggctcacgagggctgcctcccgccgttcccagcggacgttttcatgattcctcagtacgggtatctgacgcttaatgatggaagccaggccgtgggtcgttcgtccttttactgcctggaatatttcccgtcgcaaatgctaagaacgggtaacaacttccagttcagctacgagtttgagaacgtacctttccatagcagctacgctcacagccaaagcctggaccgactaatgaatccactcatcgaccaatacttgtactatctctcaaagactattaacggttctggacagaatcaacaaacgctaaaattcagtgtggccggacccagcaacatggctgtccagggaagaaactacatacctggacccagctaccgacaacaacgtgtctcaaccactgtgactcaaaacaacaacagcgaatttgcttggcctggagcttcttcttgggctctcaatggacgtaatagcttgatgaatcctggacctgctatggccagccacaaagaaggagaggaccgtttctttcctttgtctggatctttaatttttggcaaacaaggaactggaagagacaacgtggatgcggacaaagtcatgataaccaacgaagaagaaattaaaactactaacccggtagcaacggagtcctatggacaagtggccacaaaccaccagagtgcccaagcacaggcgcagaccggctgggttcaaaaccaaggaatacttccgggtatggtttggcaggacagagatgtgtacctgcaaggacccatttgggccaaaattcctcacacggacggcaactttcacccttctccgctgatgggagggtttggaatgaagcacccgcctcctcagatcctcatcaaaaacacacctgtacctgcggatcctccaacggccttcaacaaggacaagctgaactctttcatcacccagtattctactggccaagtcagcgtggagatcgagtgggagctgcagaaggaaaacagcaagcgctggaacccggagatccagtacacttccaactattacaagtctaataatgttgaatttgctgttaatactgaaggtgtatatagtgaaccccgccccattggcaccagatacctgactcgtaatctg

SEQ ID NO: 626 - DNA, 2208 bp, Artificial Sequence
  Description of Artificial Sequence: Synthetic polynucleotide
atggctgccgatggttatcttccagattggctcgaggacaaccttagtgaaggaattcgcgagtggtgggctttgaaacctggagcccctcaacccaaggcaaatcaacaacgtcaagacaacgctcgaggtcttgtgcttccgggttacaaataccttggacccggcaacggactcgacaagggggagccggtcaacgcagcagacgcggcggccctcgagcacgacaaggcctacgaccagcagctcaaggccggaggcaacccgtgcctcaagtacaaccacgccgacgccgagttccaggagcggctcaaagaagatacgtcttttgggggcaacctcgggcgagcagtcttccaggccaaaaagaggcttcttgaacctcttggtctggttgaggaagcggctaagacggctcctggaaagaagaggcctgtagagcagtctcctcaggaaccggactcctccgcgggtattggcagatcgggtgcacagcccgctaaaaagagactcaatttcggtcagactggcgacacagagtcagtcccagaccctcaaccaatcggagaacctcccgcagccccctcaggtgtgggatctcttacaatggcttcaggtggtggcgcaccagtggcagacaataacgaaggtgccgatggagtgggtagttcctcgggaaattggcattgcgattcccaatggctgggggacagagtcatcaccaccagcacccgaacctgggccctgcccacctacaacaatcacctctacaagcaaatctccaacagcacatctggaggatcttcaaatgacaacgcctacttcggctacagcaccccctgggggtattttgacttcaacagattccactgccacttctcaccacgtgactggcagcgactcatcaacaacaactggggattccggcctaagcgactcaacttcaagctcttcaacattcaggtcaaagaggttacggacaacaatggagtcaaggccatcgccaataaccttaccagcacggtccaggtcttcacggactcagactatcagctcccgtacgtgctcgggtcggctcacgagggctgcctcccgccgttcccagcggacgttttcatgattcctcagtacgggtatctgacgcttaatgatggaagccaggccgtgggtcgttcgtccttttactgcctggaatatttcccgtcgcaaatgctaagaacgggtaacaacttccagttcagctacgagtttgagaacgtacctttccatagcagctacgctcacagccaaagcctggaccgactaatgaatccactcatcgaccaatacttgtactatctctcaaagactattgacggttctggacagaatcaacaaacgctaaaattcagtgtggccggacccagcaacatggctgtccagggaagaaactacatacctggacccagctaccgacaacaacgtgtctcaaccactgtgactcaaaacaacaacagcgaatttgcttggcctggagcttcttcttgggctctcaatggacgtaatagcttgatggatcctggacctgctatggccagccacaaagaaggagaggaccgtttctttcctttgtctggatctttaatttttggcaaacaaggaactggaagagacaacgtggatgcggacaaagtcatgataaccaacgaagaagaaattaaaactactaacccggtagcaacggagtcctatggacaagtggccacaaaccaccagagtgcccaagcacaggcgcagaccggctgggttcaaaaccaaggaatacttccgggtatggtttggcaggacagagatgtgtacctgcaaggacccatttgggccaaaattcctcacacgggcggcaactttcacccttctccgctgatgggagggtttggaatgaagcacccgcctcctcagatcctcatcaaaaacacacctgtacctgcggatcctccaacggccttcaacaaggacaagctgaactctttcatcacccagtattctactggccaagtcagcgtggagatcgagtgggagctgcagaaggaaaacagcaagcgctggaacccggagatccagtacacttccaactattacaagtctaataatgttgaatttgctgttaatactgaaggtgtatatagtgaaccccgccccattggcaccagatacctgactcgtaatctg

SEQ ID NO: 627 - DNA, 2208 bp, Artificial Sequence
  Description of Artificial Sequence: Synthetic polynucleotide
atggctgccgatggttatcttccagattggctcgaggacaaccttagtgaaggaattcgcgagtggtgggctttgaaacctggagcccctcaacccaaggcaaatcaacaacatcaagacaacgctcgaggtcttgtgcttccgggttacaaataccttggacccggcaacggactcgacaagggggagccggtcaacgcagcagacgcggcggccctcgagcacgacaaggcctacgaccagcagctcaaggccggagacaacccgtacctcaagtacaaccacgccgacgccgagttccaggagcggctcaaagaagatacgtcttttgggggcaacctcgggcgagcagtcttccaggccaaaaagaggcttcttgaacctcttggtctggttgaggaagcggctaagacggctcctggaaagaagaggcctgtagagcagtctcctcaggaaccggactcctccgcgggtattggcaaatcgggtgcacagcccgctaaaaagagactcaatttcggtcagactggcgacacagagtcagtcccagaccctcaaccaatcggagaacctcccgcagccccctcaggtgtgggatctcttacaatggcttcaggtggtggcgcaccagtggcagacaataacgaaggtgccgatggagtgggtagttcctcgggaaattggcattgcgattcccaatggctgggggacagagtcatcaccaccagcacccgaacctgggccctgcccacctacaacaatcacctctacaagcaaatctccaacagcacatctggaggatcttcaaatgacaacgcctacttcggctacagcaccccctgggggtattttgacttcaacagattccactgccacttctcaccacgtgactggcagcgactcatcaacaacaactggggattccggcctaagcgactcaacttcaagctcttcaacattcaggtcaaagaggttacggacaacaatggagtcaagaccatcgccaataaccttaccagcacggtccaggtcttcacggactcagactatcagctcccgtacgtgctcgggtcggctcacgagggctgcctcccgccgttcccagcggacgttttcatgattcctcagtacgggtatctgacgcttaatgatggaagccaggccgtgggtcgttcgtccttttactgcctggaatatttcccgtcgcaaatgctaagaacgggtaacaacttccagttcagctacgagtttgagaacgtacctttccatagcagctacgctcacagccaaagcctggaccgactaatgaatccactcatcgaccaatacttgtactatctctcaaagactattaacggttctggacagaatcaacaaacgctaaaattcagtgtggccggacccagcaacatggctgtccagggaagaaactacatacctggacccagctaccgacaacaacgtgtctcaaccactgtgactcaaaacaacaacagcgaatttgcttggcctggagcttcttcttgggctctcaatggacgtaatagcttgatgaatcctggacctgctatggccagccacaaagaaggagaggaccgtttctttcctttgtctggatctttaatttttggcaaacaaggaactggaagagacaacgtggatgcggacaaagtcatgataaccaacgaagaagaaattaaaactactaacccggtagcaacggagtcctatggacaagtggccacaaaccaccagagtgcccaagcacaggcgcagaccggctgggttcaaaaccaaggaatacttccgggtatggtttggcaggacagagatgtgtacctgcaaggacccatttgggccaaaattcctcacacggacggcaactttcacccttctccgctgatgggagggtttggaatgaagcacccgcctcctcagatcctcatcaaaaacacacctgtacctgcggatcctccaacggccttcaacaaggacaagctgaactctttcatcacccagtattctactggccaagtcagcgtggagatcgagtgggagctgcagaaggaaaacagcaagcgctggaacccggagatccagtacacttccaactattacaagcctaataatgttgaatttgctgttaatactgaaggtgtatatagtgaaccccgccccattggcaccagatacctgactcgtaatctg

SEQ ID NO: 628 - DNA, 2208 bp, Artificial Sequence
  Description of Artificial Sequence: Synthetic polynucleotide
atggctgccgatggttatcttccagattggctcgaggacaaccttagtgaaggaattcgcgagtggtgggctttgaaacctggagcccctcaacccaaggcaaatcaacaacatcaagacaacgctcgaggtcttgtgcttccgggttacaaataccttggacccggcaacggactcgacaagggggagccggtcaacgcagcagacgcggcggccctcgagcacaacaaggcctacgaccagcagctcaaggccggagacaacccgtacctcaagtgcaaccacgccgacgccgagttccaggagcggctcaaagaagatacgtcttttgggggcaacctcgggcgagcagtcttccaggccaaaaagaggcctcttgaacctcttggtctggttgaggaagcggctaagacggctcctggaaagaagaggcctgtagagcagtctcctcaggaaccggactcctccgcgggtattggcaaatcgggtgcacagcccgctaaaaagagactcaatttcggtcagactggcgacacagagtcagtcccagaccctcaaccaatcggagaacctcccgcagccccctcaggtgtgagatctcttacaatggcttcaggtggtggcgcaccagtggcagacaataacgaaggtgccgatggagtgggtagttcctcgggaaattggcattgcgattcccaatggctgggggacagagtcatcaccaccagcacccgaacctgggccctgcccacctacaacaatcacctctacaagcaaatctccaacagcacatctggaggatcttcaaatgacaacgcctacctcggctacagcaccccctgggggtattttgacttcaacagattccactgccacttctcaccacgtgactggcagcgactcatcaacaacaactggggattccggcctaagcgactcaacttcaagctcttcaacattcaggtcaaagaggttacggacaacaatggagtcaagaccatcgccaataaccttaccagcacggtccaggtcttcacggactcagactatcagctcccgtacgtgctcgggtcggctcacgagggctgcctcccgccgttcccagcggacgttttcatgattcctcagtacgggtatctgacgcttaatgatggaagccaggccgtgggtcgttcgtccttttactgcctggaatatttcccgtcgcaaatgctaagaacgggtaacaacttccagttcagctacgagtttgagaacgtacctttccatagcagctacgctcacagccaaagcctggaccgactaatgaatccactcatcgaccaatacttgtactatctctcaaagactattaacggttctggacagaatcaacaaacgctaaaattcagtgtggccggacccagcaacatggctgtccagggaagaaactacatacctggacccagctaccgacaacaacgtgtctcaaccactgtgactcaaaacaacaacagcgaatttgcttggcctggagcttcttcttgggctctcaatggacgtaatagcttgatgaatcctggacctactatggccagccacaaagaaggagaggaccgtttctttcctttgtctggatctttaatttttggcaaacaaggaactggaagagacaacgtggatgcggacaaagtcatgataaccaacgaagaagaaattaaaactactaacccggtagcaacggagtcctatggacaagtggccacaaaccaccagagtgcccaagcacaggcgcagaccggctgggttcaaaaccaaggaatacttccgggtatggtttggcaggacagagatgtgtacctgcaaggacccatttgggccaaaattcctcacacggacggcaactttcacccttctccgctgatgggagggtttggaatgaagcacccgcctcctcagatcctcatcaaaaacacacctgtacctgcggatcctccaacggccttcaacaaggacaagctgaactctttcatcacccagtattctactggccaagtcagcgtggagatcgagtgggagctgcagaaggaaaacagcaagcgctggaacccggagatccagtacacttccaactattacaagtctaataatgttgaatttgctgttaatactgaaggtgtatatagtgaaccccgccccattggcaccagatacctgactcgtaatctg

SEQ ID NO: 629 - DNA, 2208 bp, Artificial Sequence
  Description of Artificial Sequence: Synthetic polynucleotide
atggctgccgatggttatcttccagattggctcgaggacaaccttagtgaaggaattcgcgagtggtgggctttgaaacctggagcccctcaacccaaggcaaatcaacaacatcaagacaacgctcgaggtcttgtgcttccgggttacaaataccttggacccggcaacggactcgacaagggggagccggtcaacgcagcagacgcggcggccctcgtgcacgacaaggcctacgaccagcagctcaaggccggagacaacccgtacctcaagtgcaaccacgccgacgccgagttccaggagcggctcaaagaagatacgtcttttgggggcaacctcgggcgagcagtcttccaggccaaaaagaggcttcttgaacctcttggtctggttgaggaagcggctaagacggctcctggaaagaagaggcctgtagagcagtctcctcaggaaccggactcctccgcgggtattggcaaatcgggtgcacagcccgctaaaaagagactcaatttcggtcagactggcgacacagagtcagtcccagaccctcaaccaatcggagaacctcccgcagccccctcaggtgtgggatctcttacaatggcttcaggtggtggcgcaccagtggcagacaataacgaaggtgccgatggagtgggtagttcctcgggaaattggcattgcgattcccaatggctgggggacagagtcatcaccaccagcacccgaacctgggccctgcccacctacaacaatcacctctacaagcaaatctccaacagcacatctggaggatcttcaaatgacaacgcctacctcggctacagcaccccctgggggtattttgacttcaacagattccactgccacttctcaccacgtgactggcagcgactcatcaacaacaactggggattccggcctaagcgactcaacttcaagctcttcaacattcaggtcaaagaggttacggacaacaatggagtcaagaccatcgccaataaccttaccagcacggtccaggtcttcacggactcagactatcagctcccgtacgtgctcgggtcggctcacgagggctgcctcccgccgttcccagcggacgttttcacgattcctcagtacgggtatctgacgcttaatgatggaagccaggccgtgggtcgttcgtccttttactgcctggaatatttcccgtcgcaaatgctaagaacgggtaacaacttccagttcagctacgagtttgagaacgtacctttccatagcagctacgctcacagccaaagcctggaccgactaatgaatccactcatcgaccaatacttgtactatctctcaaagactattaacggttctggacagaatcaacaaacgctaaaattcagtgtggccggacccagcaacatggctgtccagggaagaaactacatacctggacccagctaccgacaacaacgtgtctcaaccactgtgactcaaaacaacaacagcgaatttgcttggcctggagcttcttcttgggctctcaatggacgtaatagcttgatgaatcctggacctgctatggccagccacaaagaaggagaggaccgtttctttcctttgtctggatctttaatttttggcaaacaaggaactggaagagacaacgtggatgcggacaaagtcatgataaccaacgaagaagaaattaaaactactaacccggtagcaacggagtcctatggacaagtggccacaaaccaccagagtgcccaagcacaggcgcagaccggctgggttcaaaaccaaggaatacttccgggtatggtttggcaggacagagatgtgtacctgcaaggacccatttgggccaaaattcctcacacggacggcaactttcacccttctccgctgatgggagggtttggaatgaagcacccgcctcctcagatcctcatcaaaaacacacctgtacctgcggatcctccaacggccttcaacaaggacaagctgaactctttcatcacccagtattctactggccaagtcagcgtggagatcgagtgggagctgcagaaggaaaacagcaagcgctggaacccggagatccagtacacttccaactattacaagtctaataatgttgaatttgctgttaatactgaaggtgtatatagtgaaccccgccccattgggccccgatacctgactcgtaatttt

SEQ ID NO: 630 - DNA, 2208 bp, Artificial Sequence
  Description of Artificial Sequence: Synthetic polynucleotide
atggctgccgatggttatcttccagattggctcgaggacaaccttagtgaaggaattcgcgagtggtgggctttgaaacctggagcccctcaacccaaggcaaatcaacaacatcaagacaacgctcgaggtcttgtgcttccgggttacaaataccttggacccggcaacggactcgacaagggggagccggtcaacgcagcagacgcggcggccctcgagcacaacaaggcctacgaccagcagctcaaggccggagacaacccgtacctcaagtgcaaccacgccgacgccgagttccaggagcggctcaaagaagatacgtcttttgggggcaacctcgggcgagcagtcttccaggccaaaaagaggcttcttgaacctcttggtctggttgaggaagcggctaagacggctcctggaaagaagaggcctgtagagcagtctcctcaggaaccggactcctccgcgggtattggcaaatcgggtgcacagcccgctaaaaagagactcaatttcggtcagactggcgacacagagtcagtcccagaccctcaaccaatcggagaacctcccgcagccccctcaggtgtgagatctcttacaatggcttcaggtggtggcgcaccagtggcagacaataacgaaggtgccgatggagtgggtagttcctcgggaaattggcattgcgattcccaatggctgggggacagagtcatcaccaccagcacccgaacctgggccctgcccacctacaacaatcacctctacaagcaaatctccaacagcacatctggaggatcttcaaatgacaacgcctacctcggctacagcaccccctgggggtattttgacttcaacagattccactgccacttctcaccacgtgactggcagcgactcatcaacaacaactggggattccggcctaagcgactcaacttcaagctcttcaacattcaggtcaaagaggttacggacaacaatggagtcaagaccatcgccaataaccttaccagcacggtccaggtcttcacggactcagactatcagctcccgtacgtgctcgggtcggctcacgagggctgcctcccgccgttcccagcggacgttttcatgattcctcagtacgggtatctgacgcttaatgatggaagccaggccgtgggtcgttcgtccttttactgcctggaatatttcccgtcgcaaatgctaagaacgggtaacaacttccagttcagctacgagtttgagaacgtacctttccatagcagctacgctcacagccaaagcctggaccgactaatgaatccactcatcgaccaatacttgtactatctctcaaagactattaacggttctggacagaatcaacaaacgctaaaattcagtgtggccggacccagcaacatggctgtccagggaagaaactacatacctggacccagctaccgacaacaacgtgtctcaaccactgtgactcaaaacaacaacagcgaatttgcttggcctggagcttcttcttgggctctcaatggacgtaatagcttgatgaatcctggacctgctatggccagccacaaagaaggagaggaccgtttctttcctttgtctggatctttaatttttggcaaacaaggaactggaagagacaacgtggatgcggacaaagtcatgataaccaacgaagaagaaattaaaactactaacccggtagcaacggagtcctatggacaagtggccacaaaccaccagagtgcccaagcacaggcgcagaccggctgggttcaaaaccaaggaatacttccgggtatggtttggcaggacagagatgtgtacctgcaaggacccatttgggccaaaattcctcacacggacggcaactttcacccttctccgctgatgggagggtttggaatgaagcacccgcctcctcagatcctcatcaaaaacacacctgtacctgcggatcctccaacggccttcaacaaggacaagctgaactctttcatcacccagtattctactggccaagtcagcgtggagatcgagtgggagctgcagaaggaaaacagcaagcgctggaacccggagatccagtacacttccaactattacaagtctaataatgttgaatttgctgttaatactgaaggtgtatatagtgaaccccgccccattggcaccagatacctgactcgtaatctg

SEQ ID NO: 631 - DNA, 2208 bp, Artificial Sequence
  Description of Artificial Sequence: Synthetic polynucleotide
atggctgccgatggttatcttccagattggctcgaggacaaccttagtgaaggaattcgcgagtggtgggctttgaaacctggagcccctcaacccaaggcaaatcaacaacatcaagacaacgctcgaggtcttgtgcttccgggttacaaataccttggacccggcaacggactcgacaagggggagccggtcaacgcagcagacgcggcggccctcgagcacgacaaggcctacgaccagcagctcaaggccggagacaacccgtacctcaagtgcaaccacgccgacgccgagttccaggagcggctcaaagaagatacgtcttttgggggcaacctcgggcgagcagtcttccaggccaaaaagaggcttcttgaacctcttggtctggttgaggaagcggctaagacggctcctggaaagaagaggcctgtagagcagtctcctcaggaaccggactcctccgcgggtattggcaaatcgggtgcacagcccgctaaaaagagactcaatttcggtcagactggcgacacagagtcagtcccagaccctcaaccaatcggagaacctcccgcagccccctcaggtgtgggatctcttacaatggcttcaggcggtggcgcaccagtggcagacaataacgaaggtgccgatggagtgggtagttcctcgggaaattggcattgcgattcccaatggctgggggacagagtcatcaccaccagcacccgaacctgggccctgcccacctacaacaatcacctctacaagcaaatctccaacagcacatctggaggatcttcaaatgacaacgcctacctcggctacagcaccccctgggggtattttgacttcaacagattccactgccacttctcaccacgtgactggcagcgactcatcaacaacaactggggattccggcctaagcgactcaacttcgagctcttcaacattcaggtcaaagaggttacggacaacaatggagtcaagaccatcgccaataaccttaccagcacggtccaggtcttcacggactcagactatcagctcccgtacgtgctcgggtcggctcacgagggctgcctcccgccgttcccagcggacgttttcatgattcctcagtacgggtatctgacgcttaatgatggaagccaggccgtgggtcgttcgtccttttactgcctggaatatttcccgtcgcaaatgctaagaacgggtaacaacttccagtccagctacgagtttgagaacgtacctttccatagcagctacgctcacagccaaagcctggaccgactaatgaatccactcatcgaccaatacttgtactatctctcaaagactattaacggttctggacagaatcaacaaacgctaaaattcagtgtggccggacccagcaacatggctgtccagggaagaaactacatacctggacccagctaccgacaacaacgtgcctcaaccactgtgactcaaaacaacaacagcgaatttgcttggcctggagcttcttcttgggctctcaatggacgtaatagcttgatgaatcctggacctgctatggccagccacaaagaaggggaggaccgtttctttcctttgtctggatctttaatttttggcaaacaaggaactggaagagacaacgtggatgcggacaaagtcatgataaccaacgaagaagaaattaaaactactaacccggtagcaacggagtcctatggacaagtggccacaaaccaccagagtgcccaagcacaggcgcagaccggctgggttcaaaaccaaggaatacttccgggtatggtttggcaggacagagatgtgtacctgcaaggacccatttgggccaaaattcctcacacggacggcaactttcacccttctccgctgatgggagggtttggaatgaagcacccgcctcctcagatcctcatcaaaaacacacctgtacctgcggatcctccaacggccttcaacaaggacaagctgaactctttcatcacccagtattctactggccaagtcagcgtggagatcgagtgggagctgcagaaggaaaacagcaagcgctggaacccggagatccagtacacttccaactattacaagtctaataatgttgaatttgctgttaatactgaaggtgtatatagtgaaccccgccccattggcaccagatacctgactcgtaatctg

SEQ ID NO: 632 - DNA, 2208 bp, Artificial Sequence
  Description of Artificial Sequence: Synthetic polynucleotide
atggctgccgatggttatcttccagattggctcgaggacaaccttagtgaaggaattcgcgagtggtgggctttgaaacctggagcccctcaacccaaggcaaatcaacaacatcaagacaacgctcgaggtcttgtgcttccgggttacaaataccttggacccggcaacggactcgacaagggggagccggtcaacgcagcagacgcggcggccctcgagcacgacaaggcctacgaccagcagctcaaggccggagacaacccgtacctcaagtgcaaccacgccgacgccgagttccaggagcggctcaaagaagatacgtcttttgggggcaacctcgggcgagcagtcttccaggccaaaaagaggcttcttgaacctcttggtctggttgaggaagcggctaagacggctcctggaaagaagaggcctgtagagcagtctcctcaggaaccggactcctccgcgggtattggcaaatcgggtgcacagcccgctaaaaagagactcaatttcggtcagactggcgacacagagtcagtcccagaccctcaaccaatcggagaacctcccgcagcccccccaggtgtgggatctcttacaatggcttcaggtggtggcgcaccagtggcggacaataacgaaggtgccgatggagtgggtagttcctcgggaaattggcattgcgattcccaatggctgggggacagagtcatcaccaccagcacccgaacctgggccctgcccacctacaacaatcacctctacaagcaaatctccaacagcacatctggaggatcttcaaatgacaacgcctacctcggctacagcaccccctgggggtattttgacttcaacagattccactgccacttctcaccacgtgactggcagcgactcatcaacaacaactggggattccggcctaagcgactcaacttcaagctcttcaacattcaggtcaaagaggttacggacaacaatggagtcaagaccatcgccaataaccttaccagcacggtccaggtcttcacggactcagactatcagctcccgtacgtgctcgggtcggctcacgagggctgcctcccgccgttcccagcggacgttttcatgattcctcagtacgggtatctgacgcttaatgatggaagccaggccgtgggtcgttcgtccttttactgcctggaatatttcccgtcgcaaatgctaagaacgggtaacaacttccagttcagctacgagtttgagaacgtacctttccatagcagctacgctcacagccaaagcctggaccgactaatgaatccactcatcgaccaatacttgtactatctctcaaagactattagcggttctggacagaatcaacaaacgctaaaattcagtgtggccggacccagcaacatggctgtccagggaagaaactacatacctggacccagctaccgacaacaacgtgtctcaaccactgtgactcaaaacaacagcagcgaatttgcttggcctggagcttcttcttgggctctcaatggacgtaatagcttgatgaatcctggacctgctatggccagccacaaagaaggagaggaccgtttctttcctttgtctggatctttaatttttggcaaacaaggaactggaagagacaacgtggatgcggacaaagtcatgataaccaacgaagaagaaattaaaactactaacccggtagcaacggagtcctatggacaagtggccacaaaccaccagagtgcccaagcacaggcgcagaccggctgggttcaaaaccaaggaatactttcgggtatggtttggcaggacagagatgtgtacctgcaaggacccatttgggccaaaattcctcacacggacggcaactttcacccttctccgctgatgggagggtttggaatgaagcacccgcctcctcagatcctcatcaaaaacacacctgtacctgcggatcctccaacggccttcaacaaggacaagctgaactctttcatcacccagtattctactggccaagtcagcgtggagatcgagtgggagctgcagaaggaaaacagcaagcgctggaacccggagatccagtacacttccaactattacaagtctaataatgttgaatttgctgttaatactgaaggtgtatatagtgaaccccgccccattggcaccagatacctgactcgtaatctg

SEQ ID NO: 633 - DNA, 2208 bp, Artificial Sequence
  Description of Artificial Sequence: Synthetic polynucleotide
atggctgccgatggttatcttccagattggctcgaggacaaccttagtgaaggaattcgcgagtggtgggctttgaaacctggagcccctcaacccaaggcaaatcaacaacatcaagacaacgctcgaggtcttgtgcttccgggttacaaataccttggacccggcaacggactcgacaagggggagccggtcaacgcagcagacgcggcggccctcgagcacgacaaggcctacgaccagcagctcaaggccggagacaacccgtacctcaagtgcaaccacgccgacgccgagttccaggagcggctcaaagaagatacgtcttttgggggcaacctcgggcgagcagtcttccaggccaaaaagaggcttcttgaacctcttggtctggttgaggaagcggctaagacggctcctggaaagaagaggcctgtagagcagtctcctcaggaaccggactcctccgcgggtattggcaaatcgggtgcacagcccgctaaaaagagactcaatttcggtcagactggcgacacagagtcagtcccagaccctcaaccaatcggagaacctcccgcagccccctcaggtgtgggatctcttacaatggcttcaggtggtggcgcaccagtggcagacaataacgaaggtgccgatggagtgggtagttcctcgggaaattggcattgcgattcccaatggctgggggacagagtcatcaccaccagcacccgaacctgggccctgcccacctacaacaatcacctctacaagcaaatctccaacagcacatctggaggatcttcaaatgacaacgcctacctcggctacagcaccccctgggggtattttgacttcaacagattccactgccacttctcaccacgtgactggcagcgactcatcaacaacaactggggattccggcctaagcgactcaacttcaagctcttcaacattcaggtcaaagaggttacggacaacaatggagtcaagaccatcgccaataaccttaccagcacggtccaggtcttcacggactcagactatcagctcccgtacgtgctcgggtcggctcacgagggctgcctcccgccgttcccagcggacgttttcatgattcctcagtacgggtatctgacgcttaatgatggaagccaggccgtgggtcgttcgtccttttactgcctggaatatttcccgtcgcaaatgctaagaacgggtaacaacttccagttcagctacgagtttgagaacgtacctttccatagcagctacgctcacagccaaagcctggaccgactaatgaatccactcatcgaccaatacttgtactatctctcaaagactattaacggttctggacagaatcaacaaacgctaaaattcagtgtggccggacccagcaacatggctgtccagggaagaaactacatacctggacccagctaccgacaacaacgtgtctcaaccactgtgactcaaaacaacaacagcgaatttgcttggcctggagcttcttcttgggctctcaatggacgtaatagcttgatgaatcctggacctgctatggccagccacaaagaaggagaggaccgtttctttcctttgtctggatctttaatttttggcaaacaaggaactggaagagacaacgtggatgcggacaaagtcatgataaccaacgaagaagaaattaaaactactaacccggtagcaacggagtcctatggacaagtggccacaaaccaccagagtgcccaagcacaggcgcagaccggctgggttcaaaaccaaggaatacttccgggtatggtttggcaggacagagatgtgtacctgcaaggacccatttgggccaaaattcctcacacggacggcaactttcacccttctccgctgatgggagggtttggaatgaagcacccgcctcctcagatcctcatcaaaaacacacctgtacctgcggatcctccaacggccttcaacaaggacaagctgaactctttcatcacccagtattctactggccaagtcagcgtggagatcgagtgggagctgcagaaggaaaacagcaagcgctggaacccggagatccagtacacttccaactattacaagtctaataatgttgaatttgctgttaatactgaaggtgtatatagtgaaccccgccccattggcaccagatacctgactcgtaatctg

SEQ ID NO: 634 - DNA, 2208 bp, Artificial Sequence; identical to SEQ ID NO: 633
  Description of Artificial Sequence: Synthetic polynucleotide

SEQ ID NO: 635 - DNA, 2208 bp, Artificial Sequence
  Description of Artificial Sequence: Synthetic polynucleotide
atggctgccgatggttatcttccagattggctcgaggacaaccttagtgaaggaattcgcgagtggtgggctttgaaacctggagcccctcaacccaaggcaaatcaacaacatcaagacaacgctcgaggtcttgtgcttccgggttacaaataccttggacccggcaacggactcgacaagggggagccggtcaacgcagcagacgcggcggccctcgagcacgacaaggcctacgaccagcagctcaaggccggagacaacccgtacctcaagtgcaaccacgccgacgccgagttccaggagcggctcaaagaagatacgtcttttgggggcaacctcgggcgagcagtcttccaggccaaaaagaggcttcttgaacctcttggtctggttgaggaagcggctaagacggctcctggaaagaagaggcctgtagagcagtctcctcaggaaccggactcctccgcgggtattggcaaatcgggtgcacagcccgctaaaaagagactcaatttcggtcagactggcgacacagagtcagtcccagaccctcaaccaatcggagaacctcccgcagccccctcaggtgtgggatctcttacaatggcttcaggtggtggcgcaccagtggcagacaataacgaaggtgccgatggagtgggtagttcctcgggaaattggcattgcgattcccaatggctgggggacagagtcatcaccaccagcacccgaacctgggccctgcccacctacaacaatcacctctacaagcaaatctccaacagcacatctggaggatcttcaaatgacaacgcctacctcgactacagcaccccctgggggtattttgacttcaacagattccactgccacttctcaccacgtgactggcagcggctcatcaacaacaactggggattccggcctaagcgactcaacttcaagctcttcaacattcaggtcaaagaggttacggacaacaatggagtcaagaccatcgccaataaccttaccagcacggtccaggtcttcacggactcagactatcagctcccgtacgtgctcgggtcggctcacgagggctgcctcccgccgttcccagcggacgttttcatgattcctcagtacgggtatctgacgcttaatgatggaagccaggccgtgggtcgttcgtccttttactgcctggaatatttcccgtcgcaaatgctaagaacgggtaacaacttccagttcagctacgagtttgagaacgtacctttccatagcagctacgctcacagccaaagcctggaccgactaatgaatccactcatcgaccaatacttgtactatctctcaaagactattaacggttctggacagaatcaacaaacgctaaaattcagtgtggccggacccagcaacatggctgtccagggaagaaactacatacctggacccagctaccgacaacaacgtgtctcaaccactgtgactcaaaacaacaacagcgaatttgcttggcctggagcttcttcttgggctctcaatggacgtaatagcttgatgaatcctggacctgctatggccagccacaaagaaggagaggaccgtttctttcctttgtctggatctttaatttttggcaaacaaggaactggaagagacaacgtggatgcggacaaagtcatgataaccaacgaagaagaaattaaaactactaacccggtagcaacggagtcctatggacaagtggccacaaaccaccagagtgcccaagcacaggcgcagaccggctgggttcaaaaccaaggaatacttccgggtatggtttggcagggcagagatgtgtacctgcaaggacccatttgggccaaaattcctcacacggacggcaactttcacccttctccgctgatgggagggtttggaatgaagcacccgcctcctcagatcctcatcaaaaacacacctgtacctgcggatcctccaacggccttcaacaaggacaagctgaactctttcatcacccagtattctactggccaagtcagcgtggagatcgagtgggagctgcagaaggaaaacagcaagcgctggaacccggagatccagtacacttccaactattacaagtctaataatgttgaatttgctgttaatactgaaggtgtatatagtgaaccccgccccattggcaccagatacctgactcgtaatctg

SEQ ID NO: 636 - DNA, 2208 bp, Artificial Sequence; identical to SEQ ID NO: 633
  Description of Artificial Sequence: Synthetic polynucleotide

SEQ ID NO: 637 - DNA, 2208 bp, Artificial Sequence
  Description of Artificial Sequence: Synthetic polynucleotide
atggctgccgatggttatcctccagattggctcgaggacaaccttagtgaaggaattcgcgagtggtgggctttgaaacctggagcccctcaacccaaggcaaatcaacaacatcaagacaacgctcgaggtcttgtgcttccgggttacaaataccttggacccggcaacggactcgacaagggggagccggtcaacgcagcagacgcggcggccctcgagcacgacaaggcctacgaccagcagctcaaggccggggacaacccgcacctcaagtacaaccacgccgacgccgagttccaggagcggctcaaagaagatacgtcttttgggggcaacctcgggcgagcagtcttccaggccaaaaagaggcttcttgaacctcttggtctggttgaggaagcggctaagacggctcctggaaagaagaggcccgtagagcagtctcctcaggaaccggactcctccgcgggtattggcaaatcgggtgcacagcccgctaagaagagactcaatttcggtcagactggcgacactgagtcagtcccagaccctcaaccaatcggagaacctcccgcagccccctcaggtgtgggatctcttacaatggcttcaggtggtggcgcaccagtggcagacaataacgaaggtgccgatggagtgggtagttcctcgggaaattggcattgcgattcccaatggctgggggacagagtcatcaccaccagcacccgaacctgggccctgcccacctacaacaatcacctctacaagcaaatctccaacagcacatctggaggatcttcaaatgacaacgcctacttcggctacagcaccccctgggggtattttgacttcaacagattccactgccacttctcaccacgtgactggcagcgactcatcaacaacaactggggattccggcctaagcgactcaacttcaagctcttcaacattcaggtcaaagaggttacggacaacaatggagtcaagaccatcgccaataaccttaccagcacggtccaggtcttcacggactcagactatcagctcccgtacgtgctcgggtcggctcacgagggctgcctcccgccgttcccagcggacgttttcatgattcctcagtacgggtatctgacgcttaatgatggaagccaggccgtgggtcgttcgtccttttactgcctggaatatttcccgtcgcaaatgctaagaacgggtaacaacttccagttcagctacgagtttgagaacgtacctttccatagcagctacgctcacagccaaagcctggaccgactaatgaatccactcatcgaccaatacttgtactatctctcaaagactattaacggttctggacagaatcaacaaacgctaaaattcagtgtggccggacccagcaacatggctgtccagggaagaaactacatacctggacccagctaccgacaacaacgtgtctcaaccactgtgactcaaaacaacaacagcgaatttgcttggcctggagcttcttcttgggctctcaatggacgtaatagcttgatgaatcctggacctgctatggccagccacaaagaaggagaggaccgtttctttcctttgtctggatctttaatttttggcaaacaaggaactggaagagacaacgtggatgcggacaaagtcatgataaccaacgaagaagaaattaaaactactaacccggtagcaacggagtcctatggacaagtggccacaaaccaccagagtgcccaagcacaggcgcagaccggctgggttcaaaaccaaggaatacttccgggtatggtttggcaggacagagatgtgtacctgcaaggacccatttgggccaaaattcctcacacggacggcaactttcacccttctccgctgatgggagggtttggagtgaagcacccgcctcctcagatcctcatcaaaaacacacctgtacctgcggatcctccaacggccttcaacaaggacaggctgaactctttcatcacccagtattctactggccaagtcagcgtggagatcgagtgggagctgcagaaggaaaacagcaagcgctggaacccggagatccagtacacttccaactattacaagtctaataatgttgaatttgctgttaatactgaaggtgtatatagtgaaccccgccccattggcaccagatacctgactcgtaatctg

SEQ ID NO: 638 - DNA, 2208 bp, Artificial Sequence
  Description of Artificial Sequence: Synthetic polynucleotide
atggctgccgatggttatcttccagattggctcgaggacaaccttagtgaaggaattcgcgagtggtgggctttgaaacctggagcccctcaacccaaggcaaatcaacaacatcaagacaacgctcgaggtcttgtgcttccgggttacaaataccttggacccggcaacggactcgacaagggggagccggtcaacgcagcagacgcggcggccctcgagcacgacaaggcctacgaccagcagctcaaggccggagacaacccgtacctcaagtacaaccacgccgacgccgagttccaggagcggctcaaagaagatacgtcttttgggggcaacctcgggcgagcagtcttccaggccaaaaagaggcttcttgaacctcttggtctggttgaggaagcggctaagacggctcctggaaagaagaggcctgtagagcagtctcctcaggaaccggactcctccgcgggtattggcaaatcgggtgcacagcccgctaaaaagagactcaatttcggtcagactggcgacacagagtcagtcccagaccctcaaccaatcggagaacctcccgcagccccctcaggtgtgggatctcttacaatggcttcaggtggtggcgcaccagtggcggacaataacgaaggtgccgatggagtgggtagttcctcgggaaattggcattgcgattcccaatggctgggggacagagtcatcaccaccagcacccgaacctgggccctgcccacctacaacaatcacctctacaagcaaatctccaacagcacatctggaggatcttcaaatgacaacgcctacttcggctacagcaccccctgggggtattttgacttcaacagattccactgccacttctcaccacgtgactggcagcgactcatcaacaacaactggggattccggcctaagcgactcaacttcaagctcttcaacattcaggtcaaagaggttacggacaacaatggagtcaagaccatcgccaataaccttaccagcacggtccaggtcttcacggactcagactatcagctcccgtacgtgctcgggtcggctcacgagggctgcctcccgccgttcccagcggacgttttcatgattcctcagtacgggtatctgacgcttaatgatggaagccaggccgtgggtcgttcgtccttttactgcctggaatatttcccgtcgcaaatgctaagaacgggtaacaacttccagttcagctacgagtttgagaacgtacctttccatagcagctacgctcacagccaaagcctggaccgactaatgaatccactcatcgaccaatacttgtactatctctcaaagactattaacggttctggacagaatcaacaaacgctaaaattcagtgtggccggacccagcaacatggctgtccagggaagaaactacatacctggacccagctaccgacaacaacgtgtctcaaccactgtgactcaaaacaacaacagcgaatttgcttggcctggagcttcttcttgggctctcaatggacgtaatagtttgatgaatcctggacctgctatggccagccacaaagaaggagaggaccgtttctttcctttgtctggatctttaatttttggcaaacaaggaactggaagagacaacgtggatgcggacaaagtcatgataaccaacgaagaagaaattaaaactactaacccggtagcaacggagtcctatggacaagtggccacaaaccaccagagtgcccaagcacaggcgcagaccggctgggttcaaaaccaaggaatacttccgggtatggtttggcaggacagagatgtgtacctgcaaggacccatttgggccaaaattcctcacacggacggcaactttcacccttctccgctgatgggagggtttggagtgaagcacccgcctcctcagatcctcatcaaaaacacacctgtacctgcggatcctccaacggccttcaacaaggacaagctgaactctttcatcacccagtattctactggccaagtcagcgtggagatcgagtgggagctgcagaaggaaaacagcaagcgctggaacccggagatccagtacacttccaactattacaagtctaataatgttgaatttgctgttaatactgaaggtgtatatagtgaaccccgccccattggcaccagatacctgactcgtaatctg

SEQ ID NO: 639 - DNA, 2208 bp, Artificial Sequence
  Description of Artificial Sequence: Synthetic polynucleotide
atggctgccgatggttatcttccagattggctcgaggacaaccttagtgaaggaattcgcgagtggtgggctttgaaacctggagcccctcaacccaaggcaaatcaacaacatcaagacaacgctcgaggtcttgtgcttccgggttacaaataccttggacccggcaacggactcgacaagggggagccggtcaacgcagcagacgcggcggccctcgagcacgacaaggcctacgaccagcagctcaaggccggagacaacccgtacctcaagtacaaccacgccgacgccgagttccaggagcggctcaaagaagatacgtcttttgggggcaacctcgggcgagcagtcttccaggccaaaaagaggcttcttgaacctcttggtctggttgaggaagcggctaagacggctcctggaaagaagaggcctgtagagcagtctcctcaggaaccggactcctccgcgggtattggcaaatcgggtgcacagcccgctaaaaagagactcaatttcggtcagactggcgacacagagtcagtcccagaccctcaaccaatcggagaacctcccgcagccccctcaggtgtgggatctcttacaatggcttcaggtggtggcgcaccagtggcagacaataacgaaggtgccgatggagtgggtagttcctcgggaaattggcattgcgattcccaatggctgggggacagagtcatcaccaccagcacccgaacctgggccctgcccacttacaacaatcacctctacaagcaaatctccaacagcacatctggaggatcttcaaatgacaacgcctacttcggctacagcaccccctgggggtattttgacttcaacagattccactgccacttctcaccacgtgactggcagcgactcaccaacaacaactggggattccggcctaagcgactcaacttcaagctcttcaacattcaggtcaaagaggttacggacaacaatggagtcaagaccatcgccaataaccttaccagcacggtccaggtcttcacggactcagactatcagctcccgtacgtgctcgggtcggctcacgagggctgcctcccgccgttcccagcggacgttttcatgattcctcagtacgggtatctgacgcttaatgatggaagccaggccgtgggtcgttcgtccttttactgcctggaatatatcccgtcgcaaatgctaagaacgggtaacaacttccagttcagctacgagtttgagaacgtacctttccatagcagctacgctcacagccaaagcctggaccgactaatgaatccactcatcgaccaatacttgtactatctctcaaagactattaacggttctggacagaatcaacaaacgctaaaattcagtgtggccggacccagcaacatggctgtccagggaagaaactacatacctggacccagctaccgacaacaacgtgtctcaaccactgtgactcaaaacaacaacagcgaatttgcttggcctggagcttcttcttgggctctcaatggacgtaatagcttgatgaatcctggacctgctatggccagccacaaagaaggagaggaccgtttctttcctttgtctggatctttaatttttggcaaacaaggaactggaagagacaacgtggatgcggacaaagtcatgataaccaacgaagaagaaattaaaactactaacccggtagcaacggagtcctatggacaagtggccacaaaccaccagagtgcccaagcacaggcgcagaccggctgggttcaaaaccaaggaatacttccgggtatggtttggcaggacagagatgtgtacctgcaaggacccatttgggccaaaattcctcacacggacggcaactttcacccttctccgctgatgggagggtttggagtgaagcacccgcctcctcagatcctcatcaaaaacacacctgtacctgcggatcctccaacggccttcaacaaggacaagctgaactctttcatcacccagtattctactggccaagtcagcgtggagatcgagtgggagctgcagaaggaaaacagcaagcgctggaacccggagatccagtacacttccaactattacaagtctaataatgttgaatttgctgttaatactgaaggtgtatatagtgaaccccgccccattggcaccagatacctgactcgtaatctg

SEQ ID NO: 640 - DNA, 2208 bp, Artificial Sequence
  Description of Artificial Sequence: Synthetic polynucleotide
atggctgccgatggttatcttccagattggctcgaggacaaccttagtgaaggaattcgcgagtggtgggctttgaaacctggagcccctcaacccaaggcaaatcaacaacatcaagacaacgctcgaggtcttgtgcttccgggttacaaataccttggacccggcaacggactcgacaagggggagccggtcaacgcagcagacgcggcggccctcgagcacgacaaggcctacgaccagcagctcaaggccggagacaacccgtacctcaagtacaaccacgccgacgccgagttccaggagcggctcaaagaagatacgtcttttgggggcaacctcgggcgagcagtcttccaggccaaaaagaggcttcttgaacctcttggtctggttgaggaagcggctaagacggctcctggaaagaagaggcctgtagagcagtctcctcaggaaccggactcctccgcgggtattggcaaatcgggtgcacagcccgctaaaaagagactcaatttcggtcagactggcgacacagagtcagtcccagaccctcaaccaatcggagaacctcccgcagccccctcaggtgtgggatctcttacaatggcttcaggtggtggcgcaccagtggcagacaataacgaaggtgccgatggagtgggtagttcctcgggaaattggcattgcgattcccaatggctgggggacagagtcatcaccaccagcacccgaacctgggccctgcccacctacaacaatcacctctacaagcaaatctccaacagcacatctggaggatcttcaaatgacaacgcctacttcggctacagcaccccctgggggtattttgacttcaacagattccactgccacttctcaccacgtgactggcagcgactcatcaacaacaactggggattccggcctaagcgactcaacttcaagctcttcaacattcaggtcaaagaggttacggacaacaatggagtcaagaccatcgccaataaccttaccagcacggtccaggtcttcacggactcagactatcagctcccgtacgtgctcgggtcggctcacgagggctgcctcccgccgttcccagcggacgttttcatgattcctcagtacgggtatctgacgcttaatgatggaagccaggccgtgggtcgttcgtccttttactgcctggaatatttcccgtcgcaaatgctaagaacgggtaacaacttccagtttagctacgagtttgagaacgtacctttccatagcagctacgctcacagccaaagcctggaccgactaatgaatccactcatcgaccaatacttgtactatctctcaaagactattaacggttctggacagaatcaacaaacgctaaaattcagtgtggccggacccagcaacatggctgtccagggaagaaactacatacctggacccagctaccgacaacaacgtgtctcaaccactgtgactcaaaacaacaacagcgaatttgcttggcctggagcttcttcttgggctctcaatggacgtaatagcttgatgaatcctggacctgctatggccagccacaaagaaggagaggaccgtttctttcctttgtctggatctttaatttctggcaaacaaggaactggaagagacaacgtggatgcgaacaaagtcatgataaccaacgaagaagaaattaaaactactaacccggtagcaacggagtcctatggacaagtggccacaaaccaccagagtgcccaagcacaggcgcagaccggctgggttcaaaaccaaggaatacttccgggtatggtttggcaggacagagatgtgtacctgcaaggacccatttgggccaaaattcctcacacggacggcaactttcacccttctccgctgatgggagggtttgaaatgaagcacccgcctcctcagatcctcatcaaaaacacacctgtacctgcggatcctccaacggccttcaacaaggacaagctgaactctttcatcacccagtattctactggccaagtcagcgtggagatcgagtgggagctgcagaaggaaaacagcaagcgctggaacccggagatccagtacacttccaactattacaagtctaataatgttgaatttgctgttaatactgaaggtgtatatagtgaaccccgccccattggcaccagatacctgactcgtaatctg

SEQ ID NO: 641 - DNA, 2208 bp, Artificial Sequence
  Description of Artificial Sequence: Synthetic polynucleotide
atggctgccgatggttatcttccagattggctcgaggacaaccttagtgaaggaattcgcgagtggtgggctttgaaacctggagcccctcaacccaaggcaaatcaacaacatcaagacaacgctcgaggtcttgtgcttccgggttacaaataccttggacccggcaacggactcgacaagggggagccggtcaacgcagcagacgcggcggccctcgagcacgacaaggcctacgaccagcagctcaaggccggagacaacccgtacctcaagtacaaccacgccgacgccgagttccaggagcggctcaaagaagatacgtcttttgggggcaacctcgggcgagcagtcttccaggccaaaaagaggcttcttgaacctcttggtctggttgaggaagcggctaagacggctcctggaaagaagaggcctgtagagcagtctcctcaggaaccggactcctccgcgggtattggcaaatcgggtgcacagcccgctaaaaagagactcaatttcggtcagactggcgacacagagtcagtcccagaccctcaaccaatcggagaacctcccgcagccccctcaggtgtgggatctcttacaatagcttcaggtggtggcgcaccagtggcagacaataacgaaggtgccgatggagtgggtagttcctcgggaaattggcattgcgattcccaatggctgggggacagagtcatcaccaccagcacccgaacctgggccctgcccacctacaacaatcacctctacaagcgaatctccaacagcacatctggaggatcttcaaatgacaacgcctacttcggctacagcaccccctgggggtattttgacttcaacagattccactgccacttctcaccacgtgactggcagcgactcatcaacaacaactggggattccggcctaagcgactcaacttcaagcttttcaacattcgggtcaaagaggttacggacaacaatggagtcaagaccatcaccaataaccttaccagcacggtccaggtcttcacggactcagactatcagctcccgtacgtgcttgggtcggctcacgagggctgcctcccgccgttcccagcggacgttttcatgattcctcagtacgggtatctgacgcttaatgatggaagccaggccgtgggtcgttcgtccttttactgcctggaatatttcccgtcgcaaatgctaagaacgggtaacaacttccagttcagctacgagtttgagaacgtacctttccatagcagctacgctcacagccaaagcctggaccgactaatgaatccactcatcgaccaatacttgtactatctctcaaagactattaacggttctggacagaatcaacaaacgctaaaattcagtgtggccggacccagcaacatggctgtccagggaagaaactacatacctggacccagctaccgacaacaacgtgtctcaaccactgtgactcgaaacaacaacagcgaatttgcttggcctggagcttcttcttgggctctcaatggacgtaatagcttgatgaatcctggacctgctatggccagccacaaagaaggagaggaccgtttctttcctttgtctggatctttaatttttggcaaacaaggaactggaagagacaacgtggatgcggacaaagtcatgataaccaacgaagaagaaattaaaactactaacccggtagcaacggagtcctatggacaagtggccacaaaccaccagagtgcccaagcacaggcgcagaccggctgggttcaaaaccaaggaatacttccgggtatggtttggcaggacagagatgtgtacctgcaaggacccatttgggccaaaattcctcacacggacggcaactttcacccttctccgctgatgggagggtttggagtgaagcacccgcctcctcagatcctcatcaaaaacacacctgtacctgcggatcctccaacggccttcaacaaggacaagctgaactctttcatcacccagtattctactggccaagtcagcgtggagatcgagtgggagctgcagaaggaaaacagcaagcgctggaacccggagatccagtacacttccaactattacaagtctaataatgttgaatttgctgttaatactgaaggtgtatatagtgaaccccgccccattggcaccagatacctgactcgtaatctg

SEQ ID NO: 642 - DNA, 2208 bp, Artificial Sequence
  Description of Artificial Sequence: Synthetic polynucleotide
atggctgccgatggttatcttccagattggctcgaggacaaccttagtgaaggaattcgcgagtggtgggctttgaaacctggagcccctcaacccaaggcaaatcaacaacatcaagacaacgctcgaggtcttgtgcttccgggttacaaataccttggacccggcaacggactcgacaagggggagccggtcaacgcagcagacgcggcggccctcgagcacgacaaggcctacgaccagcagctcaaggccggagacaacccgtacctcaagtacaaccacgccgacgccgagttccaggagcggctcaaagaagatacgtcttttgggggcaacctcgggcgagcagtcttccaggccaaaaagaggcttcttgaacctcttggtctggttgaggaagcggctaagacggctcctggaaagaagaggcctgtagagcagtctcctcaggaaccggactcctccgcgggtattggcaaatcgggcgcacagcccgctaaaaagagactcaatttcggtcagactggcgacacagagccagtcccagaccctcaaccaatcggagaacctcccgcagccccctcaggtgtgggatctcttacaatggcttcaggtggtggcgcaccagtggcagacaataacgaaggtgccgatggagtgggtagttcctcgggaaattggcattgcgattcccaatggctgggggacagagtcatcaccaccagcacccgaacctgggccctgcccacctacaacaatcacctctacaagcaaatctccaacagcacatctggaggatcttcaaatgacaacgcctacttcggctacagcaccccctgggggtattttgacttcaacagattccactgccacttctcaccacgtgactggcagcgactcatcaacaacaactggggattccggcctaagcgactcaacttcaagctcttcaacattcaggtcaaagaggttacggacaacaatggagtcaagaccatcgccaataaccttaccagcacggtccaggtcttcacggactcagactatcagctcccgtacgtgctcgggtcggctcacgagggctgcctcccgccgttcccagcgggcgttttcatgattcctcagtacgggtatctgacgcttaatgatggaagccaggccgtgggtcgttcgtccttttactgcctggaatatttcccgtcgcaaatgctaagaacgggtaacaacttccagttcagctacgagtttgagaacgtacctttccatagcagctacgctcacagccaaagcctggaccgactaatgaatccactcatcgaccaatacttgtactatctctcaaagactattaacggttctggacagaatcaacaaacgctaaaattcagtgtggccggacccagcaacatggctgtccagggaagaaactacatacctggacccagctaccgacaacaacgtgtctcaaccactgcgactcaaaacaacaacagcgaatttgcttggcctggagcttcttcttgggctctcaatggacgtaatagcttgatgaatcctggacctgctatggccagccacaaagaaggagaggaccgtttctttcctttgtctggatctttaatttttggcaaacaaggaactggaagagacaacgtggatgcggacaaagtcatgataaccaacgaagaagaaattaaaactactaacccggtagcaacggagtcctatggacaagtggccacaaaccaccagagtgcccaagcacaggcgcagaccggctgggttcaaaaccaaggaatacttccgggtatggtttggcaggacagagatgtgtacctgcaaggacccatttgggccaaaattcctcacacggacggcaactttcacccttctccgctgatgggagggtttggaatgaagcacccgcctcctcagatcctcatcaaaaacacacctgtacctgcggatcctccaacggccttcaacaaggacaagctgaactctttcatcacccagtattctactggccaagtcagcgtggagatcgagtgggagctgcagaaggaaaacagcaagcgctggaacccggagatccagtacacttccaactattacaagtctaataatgttgaatttgctgttaatactgaaggtgtatatagtgaaccccgccccattggcaccagatacctgactcgtaatctg

SEQ ID NO: 643 - DNA, 2208 bp, Artificial Sequence
  Description of Artificial Sequence: Synthetic polynucleotide
atggctgccgatggttatcttccagattggctcgaggacaaccttagtgaaggaattcgcgagtggtgggctttgaaacctggagcccctcaacccaaggcaaatcaacaacatcaagacaacgctcgaggtcttgtgcttccgggttacaaataccttggacccggcaacggactcgacaagggggagccggtcaacgcagcagacgcggcggccctcgagcacgacaaggcctacgaccagcagctcaaggccggagacaacccgtacctcaagtacaaccacgccgacgccgggttccaggagcggctcaaagaagatacgtcttttgggggcaacctcgggcgagcagtcttccaggccaaaaagaggcttcttgaacctcttggtctggttgaggaagcggctaagacggctcctggaaagaagaggcctgtagagcagtctcctcaggaaccggactcctccgcgggtattggcaaatcgggtgcacagcccgctaaaaagagactcaatttcggtcagactggcgacacagagtcagtcccagtccctcaaccaatcggagaacctcccgcagccccctcaggtgtgggatctcttacaatggcttcaggtggtggcgcaccagtggcagacaataacgaaggtgccgatggagtgggtagttcctcgggaaattggcattgcgattcccaatggctgggggacagagtcatcaccaccagcacccgaacctgggccctgcccacctacaacaatcacctctacaagcaaatctccaacagcacatctggaggatcttcaaatgacaacgcctacttcggctacagcaccccctgggggtattttgacttcaacagattccactgccacttctcaccacgtgactggcagcgactcatcaacaacaactggggattccggcctaagcgactcaacttcaagctcttcaacattcaggtcaaagaggttacggacaacaatggagtcaagaccatcgccaataaccttaccagcacggtccaggtcttcacggactcagactatcagctcccgtacgtgctcgggtcggctcacgagggctgcctcccgccgttcccagcggacgttttcatgattcctcagtacgggtatctgacgcttaatgatggaagccaggccgtgggtcgttcgtccttttactgcctggaatatttcccgtcgcaaatgctaagaacgggtaacaacttccagttcagctacgagtttgagaacgtacctttccatagcagctacgctcacagccaaagcctggaccgactaatgaatccactcatcgaccaatacttgtactatctctcaaagactattaacggttctggacagaatcaacaaacgctaaaattcagtgtggccggacccagcaacatggctgtccagggaagaaactacatacctggacccagctaccgacaacaacgtgtctcaaccactgtgactcaaaacaacaacagcgaatttgcttggcctggagcttcttcttgggctctcaatggacgtaatagcttgatgaatcctggacctgctatggccagccacaaagaaggagaggaccgtttctttcctttgtctggatctttaatttttggcaaacaaggagctggaagagacaacgtggatgcggacaaagtcatgataaccaacgaagaagaaattaaaactactaacccggtagcaacggagtcctatggacaagtggccacaaaccaccagagtgcccaagcacaggcgcagaccggctgggttcaaaaccaaggaatacttccgggtatggtttggcaggacagagatgtgtacctgcaaggacccatttgggccaaaattcctcacacggacggcaactttcacccttctccgctgatgggagggtttggaatgaagcacccgcctcctcagatcctcatcaaaaacacacctgtacctgcggatcctccaacggccttcaacaaggacaagctgaactctttcatcacccagtattctactggccaagtcagcgtggagatcgagtgggagctgcagaaggaaaacagcaagcgctggaacccggagatccagtacacttccaactattacaagtctaataatgttgaatttgctgttaatactgaaggtgtatatagtgaaccccgccccattggcaccagatacctgactcgtaatctg

SEQ ID NO: 644 - DNA, 2208 bp, Artificial Sequence
  Description of Artificial Sequence: Synthetic polynucleotide
  misc_feature (377)..(377): n is a, c, t, or g
atggctgccgatggttatcttccagattggctcgaggacaaccttagtgaaggaattcgcgagaggtgggctttgaaacctggagcccctcaacccaaggcaaatcaacaacatcaagacaacgctcgaggtcttgtgcttccgggttacaaataccttggacccggcaacggactcgacaagggggagccggtcaacgcagcagacgcggcggccctcgagcacgacaaggcctacgaccagcagctcaaggccggagacaacccgtacctcaagtacaaccacgccgacgccgagttccaggagcggctcaaagaagatacgtcttttgggggcaacctcgggcgagcagtcttccaggccaaaaagaggcttcntgaacctcttggtctggttgaggaagcggctaagacggctcctggaaagaagaggcctgtagagcagtctcctcaggaaccggactcctccgcgggtattggcaaatcgggtgcacagcccgctaaaaagagactcaatttcggtcagactggcgacacagagtcagtcccagaccctcaaccaatcggagaacctcccgcagccccctcaggtgtgggatctcttacaatggcttcaggtggtggcgcaccagtggcagacaataacgaaggtgccgatggagtgggtagttcctcggggaattggcattgcgattcccaatggctgggggacagagtcatcaccaccagcacccgaacctgggccctgcccacctacaacaatcacctctacaagcaaatctccaacagcacatctggaggatcttcaaatgacaacgcctacttcggctacagcaccccctgggggtattttgacttcaacagattccactgccacttctcaccacgtgactggcagcgactcatcaacaacaactggggattccggcctaagcgactcaacttcaagctcttcaacattcaggtcaaagaggttacggacaacaatggagtcaagaccatcgccaataaccttaccagcacggtccaggtcttcacggactcagactatcagctcccgtacgtgctcgggtcggctcacgagggctgcctcccgccgttcccagcggacgttttcatgattcctcagtacgggtatctgacgcttaatgatggaagccaggccgtgggtcgttcgtccttttactgcctggaatatttcccgtcgcaaatgctaagaacgggtaacaacttccagttcagctacgagtttgagaacgtacctttccatagcagctacgctcacagccaaagcccggaccgactaatgaatccactcatcgaccaatacttgtactatctctcaaagactattaacggttctggacagaatcaacaaacgctaaaattcagtgtggccggacccagcaacatggctgtccagggaagaaactacatacctggacccagctaccgacaacaacgtgtctcaaccactgtgactcaaaacaacaacagcgaatttgcttggcctggagcttcttcttgggctctcaatggacgtaatagcttgatgaatcctggacctgctatggccagccacaaagaaggagaggaccgtttctttcctttgtctggatctttaatttttggcaaacaaggaactggaagagacaacgtggatgcggacaaagtcatgataaccaacgaagaagaaattaaaactactaacccggtagcaacggagtcctatggacaagtggccacaaaccaccagagtgcccaagcacaggcgcagaccggctgggttcaaaaccaaggaatacttccgggtatggtttggcaggacagagatgtgtacctgcaaggacccatttgggccaaaattcctcacacggacggcaactttcacccttctccgctgatgggagggtttggagtgaagcacccgcctcctcagatcctcatcaaaaacacacctgtacctgcggatcctccaacggccttcaacaaggacaagctgaactctttcatcacccagtattctactggccaagtcagcgtggagatcgagtgggagctgcagaaggaaaacagcaagcgctggaacccggagatccagtacacttccaactattacaagtctaataatgttgaatttgctgttaatactgaaggtgtatatagtgaaccccgccccattggcaccagatacctgactcgtaatctg

SEQ ID NO: 645 - DNA, 2208 bp, Artificial Sequence
  Description of Artificial Sequence: Synthetic polynucleotide
atggctgccgatggttatcttccagattggctcgaggacaaccttagtgaaggaattcgcgagtggtgggctttgaaacctggagcccctcaacccaaggcaaatcaacaacatcaagacaacgctcgaggtcttgtgcttccgggttacaaataccttggacccggcaacggactcgacaagggggagccggtcaacgcagcagacgcggcggccctcgagcacgacaaggcctacgaccagcagctcaaggccggagacaacccgtacctcaagtacaaccacgccgacgccgagttccaggagcggctcaaagaagatacgtcttttgggggcaacctcgggcgagcagtcttccaggccaaaaagaggcttcttgaacctcttggtctggttgaggaagcggctaagacggctcctggaaagaagaggcctgtagagcagtctcctcaggaaccggactcctccgcgggtattggcaaatcgggtgcacagcccgctaaaaagagactcaatttcggtcagactggcgacacagagtcagtcccagaccctcaaccaatcggagaacctcccgcagccccctcaggtgtgggatctcttacaatggcttcaggtggtggcgcaccagtggcagacaataacgaaggtgccgatggagtgggtagttcctcgggaaattggcattgcgattcccaatggctgggggacagagtcatcaccaccagcacccgaacctgggccctgcccacctacaacaatcacctctacaagcaaatctccaacagcacatctggaggatcttcaaatgacaacgcctacctcggctacagcaccccctgggggtattttgacttcaacagattccactgccacttctcaccacgtgactggcagcgactcatcaacaacaactggggattccggcctaagcgactcaacttcaagctcttcaacattcaggtcaaagaggttacggacaacaatggagtcaagaccatcgccaataaccttaccagcacggtccaggtcttcacggactcagactatcagctcccgtacgtgctcgggtcggctcacgagggctgcctcccgccgttcccagcggacgttttcatgattcctcagtacgggtatctgacgcttaatgatggaagccaggccgtgggtcgttcgtccttttactgcctggaatatttcccgtcgcaaatgctaagaacgggtaacaacttccagttcagctacgagtttgagaacgtacctttccatagcagctacgctcacagccaaagcctggaccgactaatgaatccactcatcgaccaatacttgtactatctctcaaagactattaacggttctggacagaatcaacaaacgctaaaattcagtgtggccggacccagcaacatggctgtccagggaagaaactacatacctggacccagctaccgacaacaacgtgtctcaaccactgtgactcaaaacaacaacagcgaatttgcttggcctggagcttcttcttgggctctcaatggacgtaatagcttgatgaatcctggacctgctatggccagccacaaagaaggagaggaccgtttctttcctttgtctggatctttaatttttggcaaacaaggaactggaagagacaacgtggatgcggacaaagtcatgataaccaacgaagaagaaattaaaactactaacccggtagcaacggagtcctatggacaagtggccacaaaccaccagagtgcccaagcacaggcgcagaccggctgggttcaaaaccaaggaatacttccgggtatggtttggcaggacagagatgtgtacctgcaaggacccatttgggccaaaattcctcacacggacggcaactttcacccttctccgctgatgggagggtttggaatgaagcacccgcctcctcagatcctcatcaaaaacacacctgtacctgcggatcctccaacggccttcaacaaggacaagctgaactctttcatcacccagtattctactggccaagtcagcgtggagatcgagtgggagctgcagaaggaaaacagcaagcgctggaacccggagatccagtacacttccaactattacaagtctaataatgttgaatttgctgttaatactgaaggtgtatatagtgaaccccgccccattggcaccagatacctgactcgtaatctg

SEQ ID NO: 646 - DNA, 2208 bp, Artificial Sequence
  Description of Artificial Sequence: Synthetic polynucleotide
atggctgccgatggttatcttccagattggctcgaggacaaccttagtgaaggaattcgcgagtggtgggctttgaaacctggagcccctcaacccaaggcaaatcaacaacatcaagacaacgctcgaggtcttgtgcttccgggttacaaataccttggacccggcaacggactcgacaagggggagccggtcaacgcagcagacgcggcggccctcgagcacgacaaggcctacgaccagcagctcaaggccggagacaacccgtacctcaagtacaaccacgccgacgccgagttccaggagcggctcaaagaagatacgtcttttgggggcaacctcgggcgagcagtcttccaggccaaaaagaggcttcttgaacctcttggtctggttgaggaagcggctaagacggctcctggaaagaagaggcctgtagagcagtctcctcaggaaccggactcctccgcgggtattggcaaatcgggtgcacagcccgctaaaaagagactcaatttcggtcagactggcgacacagagtcagtcccagaccctcaaccaatcggagaacctcccgcagccccctcaggtgtgggatctcttacaatggcttcaggtggtggcgcaccagtggcagacaataacgaaggtgccgatggagtgggtagttcctcgggaaattggcattgcgattcccaatggctgggggacagagtcatcaccaccagcacccgaacctgggccctgcccacctacaacaatcacctctacaagcaaatctccaacagcacatctggaggatcttcaaatgacaacgcctacttcggctacagcaccccctgggggtattttgacttcaacagattccactgccacttctcaccacgtgactggcagcgactcatcaacaacaactggggattccggcctaagcgactcaacttcaagctcttcaacattcaggtcaaagaggttacggacaacaatggagtcaagaccatcgccaataaccttaccagcacggtccaggtcttcacggactcagactatcagctcccgtacgtgctcgggtcggctcacgagggctgcctcccgccgttcccagcggacgttttcatgattcctcagtacgggtatctgacgcttaatgatggaagccaggccgtgggtcgttcgtccttttactgcctggaatatttcccgtcgcaaatgctaagaacgggtaacaacttccagttcagctacgagtttgagaacgtacctttccatagcagctacgctcacagccagagcctggaccgactaatgaatccactcatcgaccaatacttgtactatctctcaaagactattaacggttctggacagaatcaacaaacgctaaaattcagtgtggccggacccagcaacatggctgtccagggaagaaactacatacctggacccagctaccgacaacaacgtgtctcaaccactgtgactcaaaacaacaacagcgaatttgcttggcctggagcttcttcttgggctctcaatggacgtaatagcttgatgaatcctggacctgctatggccagccacaaagaaggagaggaccgtttctttcctttgtctggatctttaatttttggcaaacaaggaactggaagagacaacgtggatgcggacaaagtcatgataaccaacgaagaagaaattaaaactactaacccggtagcaacggagtcctatggacaagtggccacaaaccaccagagtgcccaagcacaggcgcagaccggctgggttcaaaaccaaggaatacttccgggtatggtttggcaggacagagatgtgtacctgcaaggacccatttgggccaaaattcctcacacggacggcaactttcacccttctccgctgatgggagggtttggaatgaagcacccgcctcctcagatcctcatcaaaaacacacctgtacctgcggatcctccaacggccttcaacaaggacaagctggactctttcatcacccagtattctactggccaagtcagcgtggagatcgagtgggagctgcagaaggaaaacagcaagcgctggaacccggtgatccagtacacttccaactattacaagtctaataatgttgaatttgctgttaatactgaaggtgtatatagtgaaccccgccccattggcaccagatacctgactcgtaatctg

SEQ ID NO: 647 - DNA, 2208 bp, Artificial Sequence
  Description of Artificial Sequence: Synthetic polynucleotide
atggctgccgatggttatcttccagattggctcgaggacaacctctctgagggcattcgcgagtggtgggacttgaaacctggagccccgaagcccaaagccaaccagcaaaagcaggacgacggccggggtctggtgcttcctggctacaagtacctcggacccttcaacggactcgacaagggggagcccgtcaacgcggcggacgcagcggccctcgagcacgacaaggcctacgaccagcagctcaaagcgggtgacaatccgtacctgcggtataaccacgccgacgccgagtttcaggagcgtctgcaagaagatacgtcttttgggggcaacctcgggcgagcagtcttccaggccaagaagcgggttctcgaacctctcggtctggttgaggaaggcgctaagacggctcctggaaagaaacgtccggtagagcagtcgccacaagagccagactcctcctcgggcatcggcaagacaggccagcagcccgctaaaaagagactcaattttggtcagactggcgactcagagtcagtccccgatccacaacctctcggagaacctccagcaacccccgctgctgtggggcctactacaatggcttcaggcggtggcgcaccaatggcagacaataacgaaggcgtcgacggagtgggtaatgcctcaggaaattggcattgcgattccacatggctgggcgacagagtcatcaccaccagcacccgcacctgggccttgcccacctacaataaccacctctacaagcaaatctccagtgcttcaacgggggccagcaacgacaaccactacttcggctacagcaccccctgggggtattttgatttcaacagattccactgccacttttcaccacgtgactggcagcgactcatcaacaacaattggggattccggcccaagagactcaacttcaaactcttcaacatccaagtcaaggaggtcacgacgaatgatggcgttacaaccatcgctaataaccttaccagcacggttcaagtcttctcggactcggagtaccagcttccgtacgtcctcggctctgcgcaccagggctgcctccctccgttcccggcggacgtgttcatgattccgcaatacggctacctgacgctcaacaatggcagccaagccgtgggacgttcatccttttactgcctggaatatttcccttctcagatgctgagaacgggcaacaactttaccttcagctacacctttgaggaagtgcctttccacagcagctacgcgcacagccagagcctggaccggctgatgaatcctctcatcgaccaatacctgtattacctgaacagaactcaaaatcagtccggaagtgcccaaaacaaggacttgctgtttagccgtgggtctccagctggcatgtctgttcagcccaaaaactggctacctggaccctgttatcggcagcagcgcgtttctaaaacaaaaacagacaacaacaacagcaattttacctggactggtgcttcaaaatataacctcaatgggcgtgaatccatcatcaaccctggcactgctatggcctcacacaaagacgacgaagacaagttctttcccatgagcggtgtcatgatttttggaaaagagagcgccggagcttcaaacactgcattggacaatgtcatgattacagacgaagaggaaattaaagccactaaccctgtggccaccgaaagatttgggaccgtggcagtcaatttccagagcagcagcacagaccctgcgaccggagatgtgcatgctatgggagcattacctggcatggtgtggcaagatagagacgtgtacctgcagggtcccatttgggccaaaattcctcacacagatggacactttcacccgtctcctcttatgggcggctttggactcaagaacccgcctcctcagatcctcatcaaaaacacgcctgttcctgcgaatcctccggcggagttttcagccacaaagcttgcttcattcatcacccaatactccacaggacaagtgagtgtggaaattgaatgggagctgcagaaagaaaacagcaagcgctggaatcccgaagtgcagtacacatccaattatgcaaaatctgccaacgttgattttactgtggacaacaatggactttatactgagcctcgccccattggcacccgttaccttacccgtcccctg

SEQ ID NO: 648 - DNA, 2208 bp, Artificial Sequence
  Description of Artificial Sequence: Synthetic polynucleotide
atggctgccgatggttatcttccagattggctcgaggacaacctctctgagggcattcgcgagtggtgggacttgaaacctggagccccgaagcccaaagccaaccagcaaaagcaggacgacggccggggtctggtgcttcctggctacaagtacctcggacccttcaacggactcgacaagggggagcccgtcaacgcggcggacgcagcggccctcgagcacgacaaggcctacgaccagcagctcaaagcgggtgacaatccgtacctgcggtataaccacgccgacgccgagtttcaggagcgtctgcaagaagatacgtcttttgggggcaacctcgggcgagcagtcttccaggccaagaagcgggttctcgaacctctcggtctggttgaggaaggcgctaagacggctcctggaaagagacgtccggtagagcagtcgccacaagagccagactcctcctcgggcatcggcaagacaggccagcagcccgctaaaaagagactcaattttggtcagactggcgactcagagtcagtccccgatccacaacctctcggagaacctccagcaacccccgctgctgtgggacctactacaatggcttcaggcggtggcgcaccaatggcagacaataacgaaggcgccgacggagtgggtaatgcctcaggaaattggcattgcgattccacatggctgggcgacagagtcatcaccaccagcacccgcacctgggccttgcccacctacaataaccacctctacaagcaaatctccagtgcttcaacgggggccagcaacgacaaccactacttcggctacagcaccccctgggggtattttgatttcaacagattccactgccacttttcaccacgtgactggcagcgactcatcaacaacaattggggattccggcccaagagactcaacttcaaactcttcaacatccaagtcaaggaggtcacgacgaatgatggcgtcacaaccatcgctaataaccttaccagcacggttcaagtcttctcggactcggagtaccagcttccgtacgtcctcggctctgcgcaccagggctgcctccctccgttcccggcggacgtgttcatgattccgcaatacggctacctgacgctcaacaatggcagccaagccgtgggacgttcatccttttactgcctggaatatttcccttctcagatgctgagaacgggcaacaactttaccttcagctacacctttgaggaagtgcctttccacagcagctacgcgcacagccagagcctggaccggctgatgaatcctctcatcgaccaatacctgtattacctgaacagaactcaaaatcagtccggaagtgcccaaaacaaggacttgctgtttagccgtgggtctccagctggcatgtctgttcagcccaaaaactggctacctggaccctgttatcggcagcagcgcgtttctaaaacaaaaacagacaacaacaacagcaattttacctggactggtgcttcaaaatataacctcaatgggcgtgaatccatcatcaaccctggcactgctatggcctcacacaaagacgacgaagacaagttctttcccatgagcggtgtcatgatttttggaaaagagagcgccggagcttcaaacactgcattggacaatgtcatgattacagacgaagaggaaattaaagccactaaccctgtggccaccgaaagatttgggaccgtggcagtcaatttccagagcagcagcacagaccctgcgaccggagatgtgcatgctatgggagcattacctggcatggtgtggcaagatagagacgtgtacctgcagggtcccatttgggccaaaattcctcacacagatggacactttcacccgtctcctcttatgggcggctttggactcaagaacccgcctcctcagatcctcatcaaaaacacgcctgttcctgcgaatcctccggcggagttttcagctacaaagtttgcttcgttcatcacccaatactccacaggacaagtgagtgtggaaattgaatgggagctgcagaaagaaaacagcaagcgctggaatcccgaagtgcagtacacatccaattatgcaaaatctgccaacgttgattttactgtggacaacaatggactttatactgagcctcgccccattggcacccgttaccttacccgtcccctg

SEQ ID NO: 649 - DNA, 2208 bp, Artificial Sequence
  Description of Artificial Sequence: Synthetic polynucleotide
atggctgccgatggttatcttccagattggctcgaggacaacctctctgagggcattcgcgagtggtgggacttgaaacctggagccccgaagcccaaagccaaccagcaaaagcaggacgacggccggggtctggtgcttcctggctacaagtacctcggacccttcaacggactcgacaagggggagcccgtcaacgcggcggacgcagcggccctcgagcacgacaaggcctacgaccagcagctcaaagcgggtgacaatccgtacccgcggtataaccacgccgacgccgagtttcaggagcgtctgcaagaagatacgtcttttgggggcaacctcgggcgagcagtcttccaggccaagaagcgggttctcgaacctctcggtctggttggggaaggcgctaagacggctcctggaaagaaacgtccggtagagcagtcgccacaagagccagactcctcctcgggcatcggcaagacaggccagcagcccgctaaaaagagactcaattttggtcagactggcgactcagagtcagtccccgatccacaacctctcggagaacctccagcaacccccgctgctgtgggacctactacaatggcttcaggcggtggcgcaccaatggcagacaataacgaaggcgccgacggagtgggtaatgcctcaggaaattggcattgcgattccacatggctgggcgacagagtcatcaccaccagcacccgcacctgggccttgcccacctacaataaccacctctacaagcaaatctccagtgcttcaacgggggccagcaacgacaaccactacttcggctacagcaccccctgggggtattttgatttcaacagattccactgccacttttcaccacgtgactggcagcgactcatcaacaacaattggggattccggcccaagagactcaacttcaaactcttcaacatccaagtcaaggaggtcacgacgaatgatggcgtcacaaccatcgctaataaccttaccagcacggttcaagtcttctcggactcggagtaccagcttccgtacgtcctcggctctgcgcaccagggctgcctccctccgttcccggcggacgtgttcatgattccgcaatacggctacctgacgctcaacaatggcagccaagccgtgggacgttcatccttttactgcctggaatatttcccttctcagatgctgagaacgggcaacaactttaccttcagctacacctttgaggaagtgcctttccacagcagctacgcgcacagccagagcctggaccggctgatgaatcctcccatcgaccaatacctgtattacctgaacagaactcaaaatcagtccggaagtgcccaaaacaaggacttgctgtttagccgtgggtctccagctggcatgtctgttcagcccaaaaactggctacctggaccctgttatcggcagcagcgcgtttctaaaacaaaaacagacaacaacaacagcaattttacctggactggtgcttcaaaatataacctcaatgggcgtgaatccatcatcaaccctggcactgctatggcctcacacaaagacgacgaagacaagttctttcccatgagcggtgtcatgatttttggaaaagagagcgccggagcttcaaacactgcattggacaatgtcatgattacagacgaagaggaaattaaagccactaaccctgtggccaccgaaagatttgggaccgtggcagtcaatttccagagcagcagcacagaccctgcgaccggagatgtgcatgctatgggagcattacctggcatggtgtggcaagatagagacgtgtacctgcagggtcccatttgggccaaaattcctcacacagatggacactttcacccgtctcctcttatgggcggctttggactcaagaacccgcctcctcagatcctcatcaaaaacacgcctgttcctgcgaatcctccggcggagttttcagctacaaagtttgcttcattcatcacccaatactccacaggacaagtgagtgtggaaattgaatgggagctgcagaaagaaaacagcaagcgctggaatcccgaagtgcagtacacatccaattatgcaaaatctgccaacgttgattttactgtggacaacaatggactttatactgagcctcgccccattggcacccgttaccttacccgtcccctg

SEQ ID NO: 650 - DNA, 2208 bp, Artificial Sequence
  Description of Artificial Sequence: Synthetic polynucleotide
atggctgccgatggttatcttccagattggctcgaggacaacctctctgagggcattcgcgagtggtgggacttgaaacctggagccccgaagcccaaagccaaccagcaaaagcaggacgacggccggggtctggtgcttcctggctacaagtacctcggacccttcaacggactcgacaagggggagcccgtcaacgcggcggacgcagcggccctcgagcacgacaaggcctacgaccagcagctcaaagcgggtgacaatccgtacctgcggtataaccacgccgacgccgagtttcaggagcgtctgcaagaagatacgtcttttgggggcaacctcgggcgagcagtcttccaggccaagaagcgggttctcgaacctctcggtctggttgaggaaggcgctaagacggctcctggaaagaaacgtccggtagagcagtcgccacaagagccagactcctcctcgggcatcggcaagacaggccagcagcccgctaaaaagagactcaattttggtcagactggcgactcagagtcagtccccgatccacgacctctcggagaacctccagcaacccccgctgctgtgggacctactacaatggcttcaggcggtggcgcaccaatggcagacaataacgaaggcgccgacggagtgggtaatgcctcaggaaattggcattgcgattccacatggctgggcgacagagtcatcaccaccagcacccgcacctgggccttgcccacctacaataaccacctctacaagcaaatctccagtgcttcaacgggggccagcaacgacaaccactacttcggctacagcaccccctgggggtattttgatttcaacagattccactgccacttttcaccacgcgactggcagcgactcatcaacaacaattggggattccggcccaagagactcaacttcaaactcttcaacatccaagtcaaggaggtcacgacgaatgatggcgtcacaaccatcgctaataaccttaccagcacggttcaagtcttctcggactcggagtaccagcttccgtacgtcctcggctctgcgcaccagggctgcctccctccgttcccggcggacgtgttcatgattccgcaatacggctacctgacgctcaacaatggcagccaagccgtgggacgttcatccttttactgcctggaatatttcccttctcagatgctgagaacgggcaacaactttaccttcagctacacctttgaggaagtgcctttccacagcagctacgcgcacagccagagcctggaccggctgatgaatcctctcatcgaccaatacctgtattacctgaacagaactcaaaatcagtccggaagtgcccaaaacaaggacttgctgtttagccgtgggcctccagctggcatgtctgttcagcccaaaaactggctacctggaccctgttatcggcagcagcgcgtttctaaaacaaaaacagacaacaacaacagcaattttacctggactggtgcttcaaaatataacctcaatgggcgtgaatccatcatcaaccctggcactgctatggcctcacacaaagacgacgaagacaagttctttcccatgagcggtgtcatgatttttggaaaagagagcgccggagcttcaaacactgcattggacaatgtcatgattacggacgaagaggaaattaaagccactaaccctgtggccaccgaaagatttgggaccgtggcagtcaatttccagagcagcagcacagaccctgcgaccggagatgtgcatgctatgggagcattacctggcatggtgtggcaagatagagacgtgtacctgcagggtcccatttgggccaaaattcctcacacagatggacactttcacccgtctcctcttatgggcggctttggactcaagaacccgcctcctcagatcctcatcaaaaacacgcctgttcctgcgaatcctccggcggagttttcagctacaaagtttgcttcattcatcacccaatactccacaggacaagtgagtgtggaaattgaatgggagctgcagaaagaaaacagcaagcgctggaatcccgaagtgcagtacacatccaattatgcaaaatctgccaacgttgattttactgtggacaacaatggactttatactgagcctcgccccattggcacccgttaccttacccgtcccctg

SEQ ID NO: 651 - DNA, 2208 bp, Artificial Sequence
  Description of Artificial Sequence: Synthetic polynucleotide
atggctgccgatggttatcttccagattggctcgaggacaacctctctgagggcattcgcgagtggtgggacttgaaacctggagccccgaagcccaaagccaaccagcaaaagcaggacgacggccggggtctggtgcttcctggctacaagtacctcggacccttcaacggactcgacaagggggagcccgtcaacgcggcggacgcagcggccctcgagcacgacaaggcctacgaccagcagctcaaagcgggtgacaatccgtacctgcggtataaccacgccgacgccgagtttcaggagcgtctgcaagaagatacgtcttttgggggcaacctcgggcgagcagtcttccaggccaagaagcgggttctcgaacctctcggtctggttgaggaaggcgctaagacggctcctggaaagaaacgtccggtagagcagtcgccacaagagccagactcctcctcgggcatcggcaagacaggccagcagcccgctaaaaagagactcaattttggtcagactggcggctcagagtcagtccccgatccacaacctctcggagaacctccagcaacccccgctgctgtgggacctactacaatggcttcaggcggtggcgcaccaatggcagacaataacgaaggcgccgacggagtgggtaatgcctcaggaaattggcattgcgattccacatggctgggcgacagagtcatcaccaccagcacccgcacctgggccttgcccacctacaataaccacctctacaagcaaatctccagtgcttcaacgggggccagcaacgacaaccactacttcggctacagcaccccctgggggtattttgatttcaacagattccactgccacttttcaccacgtgactggcagcgactcatcaacaacaattggggattccggcccaagagactcaacttcaaactcttcaacatccaagtcaaggaggtcacgacgaatgatggcgtcacaaccatcgctaataaccttaccagcacggttcaagtcttctcggactcggagtaccagcttccgtacgtcctcggctctgcgcaccagggctgcctccctccgttcccggcggacgtgttcatgattccgcaatacggctacctgacgctcaacaatggcagccaagccgtgggacgttcatccttttactgcctggaatatttcccttctcagatgctgagaacgggcaacaactttaccttcagctacacctttgaggaagtgcctttccacagcagctacgcgcacagccagagcctggaccggctgatgaatcctcccatcgaccaatacctgtattacctgaacagaactcaaaatcagtccgggagtgcccaaaacaaggacttgctgtttagccgtgggtctccagctggcatgtctgttcagcccaaaaactggctacctggaccctgttatcggcagcagcgcgtttctaaaacaaaaacagacaacaacaacagcaattttacctggactggtgcttcaaaatataacctcaatgggcgtgaatccatcatcaaccctggcactgctatggcctcacacaaagacgacgaagacaagttctttcccatgagcggtgtcatgatttttggaaaagagagcgccggagcttcaaacactgcattggacaatgtcatgattacagacgaagaggaaattaaagccactaaccctgtggccaccgaaagatttgggaccgtggcagtcaatttccagagcagcagcacagaccctgcgaccggagatgtgcatgctatgggagcattacctggcatggtgtggcaagatagagacgtgtacctgcagggtcccatttgggccaaaattcctcacacagatggacactttcacccgtctcctcttatgggcggctttggactcaagaacccgcctcctcagatcctcatcaaaaacacgcctgttcctgcgaatcctccggcggagttttcagctacaaagtttgcttcattcatcacccaatactccacaggacaagtgagtgtggaaattgaatgggagctgcagaaagaaaacagcaagcgctggaatcccgaagtgcagtacacatccaattatgcaaaatctgccaacgttgactttactgtggacaacaatggactttatactgagcctcgccccattggcacccgttaccttacccgtcccctg

SEQ ID NO: 652 - DNA, 2208 bp, Artificial Sequence
  Description of Artificial Sequence: Synthetic polynucleotide
atggctgccgatggttatcttccagattggctcgaggacaacctctctgagggcattcgcgagtggtgggacttgaaacctggagccccgaagcccaaagccaaccagcaaaagcaggacgacggccggggtctggtgcttcctggctacaagtacctcggacccttcaacggactcgacaagggggagcccgtcaacgcggcggacgcagcggccctcgagcacgacaaggcctacgaccagcagctcaaagcgggtgacaatccgtacctgcggtataaccacgccgacgccgagtttcaagagcgtctgcaagaagatacgtcttttgggggcaacctcgggcgagcagtcttccaggccaagaagcgggttctcgaacctctcggtctggttgaggaaggcgctaagacggctcctggaaagaaacgtccggtagagcagtcgccacaagagccagactcctcctcgggcatcggcaagacaggccagcagcccgctaaaaagagactcaattttggtcagactggcgactcagagtcagtccccgatccgcaacctctcggagaacctccagcaacccccgctgctgtgggacctactacaatggcttcaggcggtggcgcaccaatggcagacaataacgaaggcgccgacggagtgggtaatgcctcaggaaattggcattgcgattccacatggctgggcgacagagtcatcaccaccagcacccgcacctgggccttgcccacctacaataaccacctctacaagcaaatctccagtgcttcaacgggggccagcaacgacaaccactacttcggctacagcaccccctgggggtattttgatttcaacagattccactgccacttttcaccacgtgactggcagcgactcatcaacaacaattggggattccggcccaagagactcaacttcaaactcttcaacatccaagtcaaggaggtcacgacgaatgatggcgtcacaaccatcgctaataaccttaccagcacggttcaagtcttctcggactcggagtaccagcttccgtacgtcctcggctctgcgcaccagggctgcctccctccgttcccggcggacgtgttcatgattccgcaatacggctacctgacgctcaacaatggcagccaagccgtgggacgttcatccttttactgcctggaatatttcccttctcagatgctgagaacgggcaacaactttaccttcagctacacctttgaggaagtgcctttccacagcagctacgcgcacagccagagcctggaccggctgatgaatcctctcatcgaccaatacctgtattacctgaacagaactcaaaatcagtccggaagtgcccaaaacaaggacttgctgtttagccgtgggtctccagctggcatgtctgttcagcccaaaaactggctacctggaccctgttatcggcagcagcgcgtttctaaaacaaaaacagacaacaacaacagcaattttacctggactggtgcttcaaaatataacctcaatgggcgtgaatccatcatcaaccctggcactgctgtggcctcacacaaagacgacgaagacaagttctttcccatgagcggtgtcatgatttttggaaaagagagcgccggagcttcaaacactgcattggacaatgtcatgattacagacgaagaggaaattaaagccactaaccctgtggccaccgaaagatttgggaccgtggcagtcaatttccagagcagcagcacagaccctgcgaccggagatgtgcatgctatgggagcattacctggcatggtgtggcaagatagagacgtgtacctgcagggtcccatttgggccaaaattcctcacacagatggacactttcacccgtctcctcttatgggcggctttggactcaagaacccgcctcctcagatcctcatcaaaaacacgcctgttcctgcgaatcctccggcggagttttcagctacaaagtttgcttcattcatcacccaatactccacaggacaagtgagtgtggaaattgaatgggagctgcagaaagaaaacagcaagcgctggaatcccgaagtgcagtacacatccaattatgcaaaatctgccaacgttgattttactgtggacaacaatggactttatactgagcctcgccccattggcacccgttaccttacccgtcccctg

SEQ ID NO: 653 - DNA, 2208 bp, Artificial Sequence
  Description of Artificial Sequence: Synthetic polynucleotide
atggctgccgatggttatcttccagattggctcgaggacaacctctctgagggcattcgcgagtggtgggacttgaaacctggagccccgaagcccaaagccaaccagcaaaagcaggacgacggccggggtctggtgcttcctggctacaagtacctcggacccttcaacggactcgacaagggggagcccgtcaacgcggcggacgcagcggccctcgagcacgacaaggcctacgaccagcagctcaaagcgggtgacaatccgtacctgcggtataaccacgccgacgccgagtttcaggagcgtctgcaagaagatacgtcttttgggggcaacctcgggcgagcagtcttccaggccaagaagcgggttctcgaacctctcggtctggttgaggaaggcgctaagacggctcctggaaagaaacgtccggtagagcagtcgccacaagagccagactcctcctcgggcatcggcaagacaggccagcagcccgctaaaaagagactcaattttggtcagactggcgactcagagtcagtccccgatccacaacctctcggagaacctccagcaacccccgctgctgtgggacctactacaatggcttcaggcggtggcgcaccaatggcagacaataacgaaggcgccgacggagtgggtaatgcctcaggaaattggcattgcgattccacatggctgggcgacagagtcatcaccaccagcacccgcacctgggccttgcccacctacaataaccacctctacaagcaaatctccagtgcttcaacgggggccagcaacgacaaccactacttcggctacagcaccccctgggggtattttgatttcaacagattccactgccacttttcaccacgtgactggcagcaactcatcaacaacaattggggattccggcccaagagactcaacttcaaactcttcaacatccaagtcaaggaggtcacgacgaatgatggcgtcacaaccatcgctaataaccttaccagcacggttcaagtcttctcggactcggagtaccagcttccgtacgtcctcggctctgcgcaccagggctgcctccctccgttcccggcggacgtgttcatgattccgcaatacggctacctgacgctcaacaatggcagccaagccgtgggacgttcatccttttactgcctggaatatttcccttctcagatgctgagaacgggcaacaactttaccttcagctacacctttgaggaagtgcctttccacagcagctacgcgcacagccagagcctggaccggctgatgaatcctctcatcgaccaatacctgtattacctgaacagaactcaaaatcagtccggaagtgcccaaaacaaggacttgctgtttagccgtgggtctccagctggcatgtctgttcagcccaaaaactggctacctggaccctgttatcggcagcagcgcgtttctaaaacaaaaacagacaacaacaacagcaattttacctggactggtgcttcaaaatataacctcaatgggcgtgaatccatcatcaaccctggcactgctatggcctcacacaaagacgacgaagacaagttctttcccatgagcggtgtcatgatttttggaaaagagagcgccggagcttcaaacactgcattggacaatgtcatgattacagacgaagaggaaattaaagccactaaccctgtggccaccgaaagatttgggaccgtggcagtcaatttccagagcaccagcacagaccctgcgaccggagatgtgcatgctatgggagcattacctggcatggtgtggcaagatagagacgtgtacctgcagggtcccatttgggccaaaattcctcacacagatggacactttcacccgtctcctcttatgggcggctttggactcaagaacccgcctcctcagatcctcatcaaaaacacgcctgttcctgcgaatcctccggcggagttttcagctacaaagtttgcttcattcatcacccaatactccacaggacaagtgagtgtggaaattgaatgggagctgcagaaagaaaacagcaagcgctggaatcccgaagtgcagtacacatccaattatgcaaaatctgccgacgttgattttactgtggacaacaatggactttatactgagcctcgccccattggcacccgttaccttacccgtcccctg

SEQ ID NO: 654 - DNA, 2208 bp, Artificial Sequence
  Description of Artificial Sequence: Synthetic polynucleotide
atggctgccgatggttatcttccagattggctcgaggacaacctctctgagggcattcgcgagtggtgggacttgaaacctggagccccgaagcccaaagccaaccagcaaaagcaggacgacggccggggtctggtgcttcctggctacaagtacctcggacccttcaacggactcgacaagggggagcccgtcaacgcggcggacgcagcggccctcgagcacgacaaggcctacgaccagcagctcaaagcgggtgacaatccgtacctgcggtataaccacgccgacgccgagtttcaagagcgtctgcaagaagatacgtcttttgggggcaacctcgggcgagcagtcttccaggccaagaagcgggttctcgaacctctcggtctggttgaggaaggcgctaagacggctcctggaaagaaacgtccggtagagcagtcgccacaagagccagactcctcctcgggcatcggcaagacaggccagcagcccgctaaaaagagactcaattttggtcagactggcgactcagagtcagtccccgatccgcaacctctcggagaacctccagcaacccccgctgctgtgggacctactacaatggcttcaggcggtggcgcaccaatggcagacaataacgaaggcgccgacggagtgggtaatgcctcaggaaattggcattgcgattccacatggctgggcgacagagtcatcaccaccagcacccgcacctgggccttgcccacctacaataaccacctctacaagcaaatctccagtgcttcaacgggggccagcaacgacaaccactacttcggctacagcaccccctgggggtattttgatttcaacagattccactgccacttttcaccacgtgactggcagcgactcatcaacaacaattggggattccggcccaagagactcaacttcaaactcttcaacatccaagtcaaggaggtcacgacgaatgatggcgtcacaaccatcgctaataaccttaccagcacggttcaagtcttctcggactcggagtaccagcctccgtacgtcctcggctctgcgcaccagggctgcctccctccgttcccggcggacgtgttcatgattccgcaatacggccacctgacgctcaacaatggcagccaagccgtgggacgttcatccttttactgcctggaatatttcccttctcagatgctgagaacgggcaacaactttaccttcagctacacctttgaggaagtgcctttccacagcagctacgcgcacagccagagcctggaccggctgacgaatcctctcatcgaccaatacctgtattacctgaacagaactcaaaatcagtccggaagtgcccaaaacaaggacttgctgtttagccgtgggtctccagctggcatgtctgttcagcccaaaaactggctacctggaccctgttatcggcagcagcgcgtttctaaaacaaaaacagacaacaacaacagcaattttacctggactggtgcttcaaaatataacctcaatgggcgtgaatccatcatcaaccctggcactgctatggcctcacacaaagacgacgaagacaagttctttcccatgagcggtgtcatgatttttggaaaagagagcgccggagcttcaaacactgcattggacaatgtcatgattacagacgaagaggaaattaaagccactaaccctgtggccaccgaaagatttgggaccgtggcagtcaatttccagagcagcagcacagaccctgcgaccggagatgtgcatgctatgggagcattacctggcatggtgtggcaagatagagacgtgtacctgcagggtcccatttgggccaaaattcctcacacagatggacactttcacccgtctcctcttatgggcggctttggactcaagaacccgcctcctcagatcctcatcaaaaacacgcctgttcctgcgaatcctccggcggagttttcagctacaaagtttgcttcattcatcacccaatactccacaggacaagtgagtgtggaaattgaatgggagctgcagaaagaaaacagcaagcgctggaatcccgaagtgcagtacacatccaattatgcaaaatctgccaacgttgattttactgtggacaacaatggactttatactgagcctcgccccattggcacccgttaccttacccgtcccctg

SEQ ID NO: 655 - DNA, 2208 bp, Artificial Sequence
  Description of Artificial Sequence: Synthetic polynucleotide
atggctgccgatggttatcttccagattggctcgaggacaacctctctgagggcattcgcgagtggtgggacttgaaacctggagccccgaagcccaaagccaaccagcaagagcaggacgacggccggggtctggtgcttcctggctacaagtacctcggacccttcaacggactcgacaagggggagcccgtcaacgcggcggacgcagcggccctcgagcacgacaaggcctacgaccagcagctcaaagcgggtgacaatccgtacctgcggtataaccacgccgacgccgagtttcaggagcgtctgcaagaagatacgtcttttgggggcaacctcgggcgagcagtcttccaggccaagaagcgggttctcgaacctctcggtctggttgaggaaggcgctaagacggctcctggaaagaaacgtccggtagagcagtcgccacaagagccagactcctcctcgggcatcggcaagacaggccagcagcccgctaaaaagagactcaattttggtcagactggcgactcagagtcagtccccgatccacaacctctcggagaacctccagcaacccccgctgctgtgggacctactacaatggcttcaggcggtggcgcaccaatggcagacaataacgaaggcgccgacggagtgggtaatgcctcaggaaattggcattgcgattccacatggctgggcgacagagtcatcaccaccagcacccgcacctgggccttgcccacctacaataaccacctctacaagcaaatctccagtgcttcaacgggggccagcaacgacaaccactacttcggctacagcaccccctgggggtattttgatttcaacagattccactgccacttttcaccacgtgactggcagcgactcatcaacaacaattggggattccggcccaagagactcaacttcaaactcttcaacatccaagtcaaggaggtcacgacgaatgatggcgtcacaaccatcgctaataaccttaccagcacggttcaagtcttctcggactcggagtaccagcttccgtacgtcctcggctctgcgcaccagggctgcctccctccgttcccggcggacgtgttcatgattccgcaatacggctacctgacgctcaacaatggcagccaagccgtgggacgttcatccttttactgcctggaatatttcccttctcagatgctgagaacgggcaacaactttaccttcagctacacctttgaggaagtgcctttccacagcagctacgcgcacagccagagcctggaccggctgatgaatcctctcatcgaccaatacctgtattacctgaacagaactcaaaatcagtccggaagtgcccaaaacaaggacttgctgtttagccgtgggtctccagctggcatgtctgttcagcccaaaaactggctacctggaccctgttatcggcagcagcgcgtttctaaaacaaaaacagacaacaacaacagcaattttacctggactggtgcttcaaaatataacctcaatgggcgtgaatccatcatcaaccctggcactgctatggcctcacacaaagacgacgaagacaagttctttcccatgagcggtgtcatgatttttggaaaagagagcgccggagcttcaaacactgcattggacaatgtcatgattacagacgaagaggaaattaaagccactaaccctgtggccaccgaaagatttgggaccgtggcagtcaatttccagagcagcagcacagaccctgcgaccggagatgtgcatgctacgggaacattacctggcatggtgtggcaagatagagacgtgtacctgcagggtcccatttgggccaaaattcctcacacagatggacactttcacccgtctcctcttatgggcggctttggactcaagaacccgcctcctcagatcctcatcaaaaccacgcctgttcctgcgaatcctccggcggagttttcagctacaaagtttgcttcattcatcacccagtactccacaggacaagtgagtgtggaaattgaatgggagctgcagaaagaaaacagcaagcgctggaatcccgaagtgcagtacacatccaattatgcaaaatctgccaacgttgattttactgtggacgacaatggactttatactgagcctcgccccattggcacccgttaccttacccgtcccctg

SEQ ID NO: 656 - DNA, 2208 bp, Artificial Sequence
  Description of Artificial Sequence: Synthetic polynucleotide
atggctgccgatggttatcttccagattggctcgaggacaacctctctgagggcattcgcgagtggtgggacttgaaacctggagccccgaagcccaaagccaaccagcaaaagcaggacgacggccggggtctggtgcttcctggctacaagtacctcggacccttcaacggactcgacaagggggagcccgtcaacgcggcggacgcagcggccctcgagcacgacaaggcctacgaccagcagctcaaagcgggtgacaatccgtacctgcggtataaccacgccgacgccgagtttcaggagcgtctgcaagaagatacgtcttttgggggcaacctcgggcgagcagtcttccaggccaagaagcgggttctcgaacctctcggtctggttgaggaaggcgctaagacggctcctggaaagaaacgtccggtagagcagtcgctacaagagccagactcctcctcgggcatcggcaagacaggccagcagcccgctaaaaagagactcaattttggtcagactggcgactcagagtcagtccccgatccacaacctctcggagaacctccagcaacccccgctgctgtgggacctactacaatggcttcaggcggtggcgcaccaatggcagacaataacgaaggcgccgacggagtgggtaatgcctcaggaaattggcattgcgattccacatggctgggcgacagagtcatcaccaccagcacccgcacctgggccttgcccacctacaataaccacctctacaagcaaatctccagtgcttcaacgggggccagcaacgacaaccactacttcggctacagcaccccctgggggtattttgatttcaacagattccactgccacttttcaccacgtgactggcagcgactcatcaacaacaattggggattccggcccaagagactcaacttcaaactcttcaacatccaagtcaaggaggtcacgacgaatgatggcgtcacaaccatcgctaataaccttaccagcacggttcaagtcttctcggactcggagtaccagcttccgtacgtcctcggctctgcgcaccagggctgcctccctccgttcccggcggacgtgttcatgattccgcaatacggctacctgacgctcaacaatggcagccaagccgtgggacgttcatccttttactgcctggaatatttcccttctcagatgctgagaacgggcaacaactttaccttcagctacacctttgaggaagtgcctttccacagcagctacgcgcacagccagagcctggaccggctgatgaatcctctcatcgaccaatacctgtattacctgaacagaactcaaaatcagtccggaagtgcccaaaacaaggacttgctgtttagccgtgggtctccagctggcatgtctgttcagcccaaaaactggctacctggaccctgttatcggcagcagcgcgtttctaaaacaaaaacagacaacgacaacagcaattttacctggactggtgcttcaaaatataacctcaatgggcgtgaatccatcatcaaccctggcactgctatggcctcacacaaagacgacgaagacaagttctttcccatgagcggtgtcatgatttttggaaaagagagcgccggagcttcaaacactgcattggacaatgtcatgattacagacgaagaggaaattaaagccactaaccctgtggccaccgaaagatttgggaccgtggcagtcaatttccagagcagcagcacagaccctgcgaccggagatgtgcatgctatgggagcattacctggcatggtgtggcaagatagagacgtgtacctgcagggtcccatttgggccaaaattcctcacacagatggacactttcacccgtctcctcttatgggcggctttggactcaagaacccgcctcctcagatcctcatcaaaaacacgcctgttcctgcgaatcctccggcggagttttcagctacaaagtttgcttcattcatcacccaatactccacaggacaagtgagtgtggaaattgaatgggagctgcagaaagaaaacagcaagcgctggaatcccgaagtgcagtacacatccaattatgcaaaatctgccaacgttgattttactgtggacaacaatggactttatactgagcctcgccccattggcacccgttaccttacccgtcccctg

SEQ ID NO: 657 - DNA, 2208 bp, Artificial Sequence
  Description of Artificial Sequence: Synthetic polynucleotide
atggctgccgatggttatcttccagattggctcgaggacaacctctctgagggcattcgcgagtggtgggacttgaaacctggagctccgaagcccaaagccaaccagcaaaagcaggacgacggccggggtctggtgcttcctggctacaagtacctcggacccttcaacggactcgacaagggggagcccgtcaacgcggcggacgcagcggccctcgagcacgacaaggcctacgaccagcagctcaaagcgggtgacaatccgtacctgcggtataaccacgccgacgccgagtttcaggagcgtctgcaagaagatacgtcttttgggggcaacctcgggcgagcagtcttccaggccaagaagcgggttctcgaacctctcggtctggttgaggaaggcgctaagacggctcctggaaagaaacgtccggtagagcagtcgccacaagagccagactcctcctcgggcatcggcaagacaggccagcagcccgctaaaaagagactcaattttggtcagactggcgactcagagtcagtccccgatccacaacctctcggagaacctccagcaacccccgctgctgtgggacctactacaatggcttcaggcggtggcgcaccaatggcagacaataacgaaggcgccgacggagtgggtaatgcctcaggaaattggcattgcgattccacatggctgggcgacagagtcatcaccaccagcacccgcacctgggccttgcccacctacaataaccacctctacaagcaaatctccagtgcttcaacgggggccagcaacgacaaccactacttcggctacagcaccccctgggggtattttgatttcaacagattccactgccacttttcaccacgtgactggcagcgactcatcaacaacaattggggattccggcccaagagactcaacttcaaactcttcaacatccaagtcaaggaggtcacgacgaatgatggcgtcacaaccatcgctaataaccttaccagcacggttcaagtcttctcggactcggagtaccagcttccgtacgtcctcggctctgcgcaccagggctgcctccctccgttcccggcggacgtgttcatgattccgcaatacggctacctgacgctcaacaatggcagccaagccgtgggacgttcatccttttactgcctggaatatttcccttctcagatgctgagaacgggcaacaactttaccttcagctacacctttgaggaagcgcctttccacagcagctacgcgcacagccagagcctggaccggctgatgaatcctctcatcgaccaatacctgtattacctgaacagaactcaaaatcagtccggaagtgcccaaaacaaggacttgctgtttagccgtgggtctccagctggcatgtctgttcagcccaaaaactggctacctggaccctgttatcggcagcagcgcgtttctaaaacaaaaacagacaacaacaacagcaattttacctggactggtgcttcaaaatataacctcaatgggcgtgaatccatcatcaaccctggcactgctatggcctcacacaaagacgacgaagacaagttctttcccatgagcggtgtcatgatttttggaaaagagagcgccggagcttcaaacactgcattggacaatgtcatgattacagacgaagaggaaattaaagccactaaccctgtggccaccgaaagatttgggaccgtggcagtcaatttccagagcagcagcacagaccctgcgaccggagatgtgcatgctatgggagcattacctggcatggtgtggcaagatagagacgtgtacctgcagggtcccatttgggccaaaattcctcacacagatggacactttcacccgtctcctcttatgggcggctttggactcaagaacccgcctcctcagatcctcatcaaaaacacgcctgttcctgcgaatcctccggcggagttttcagctacaaagtttgcttcattcatcacccaatactccacaggacaagtgagtgtggaaattgaatgggagctgcagaaagaaaacagcaagcgctggaatcccgaagtgcagtacacatccaattatgcgaaatctgccaacgttgattttactgtggacaacaatggactttatactgagcctcgccccgttggcacccgttaccttacccgtcccctg

SEQ ID NO: 658 - DNA, 2208 bp, Artificial Sequence
  Description of Artificial Sequence: Synthetic polynucleotide
atggctgccgatggttatcttccagattggctcgaggacaacctctctgagggcattcgcgagtggtgggacttgaaacctggagccccgaagcccaaagccaaccagcaaaagcaggacgacggccggggtctggtgcttcctggctacaagtacctcggacccttcaacggactcgacaagggggagcccgtcaacgcggcggacgcagcggccctcgagcacgacaaggcctacgaccagcagctcaaagcgggtgacaatccatacctgcggtataaccacgccgacgccgagtttcaggagcgtctgcaagaaaatacgtcttttgggggcaacctcgggcgagcagtcttccaggccaagaagcgggttctcgaacctctcggtctggttgaggaaggcgctaagacggctcctggaaagaaacgtccggtagagcagtcgccacaagagccagactcctcctcgggcatcggcaagacaggccagcagcccgctaaaaagagactcaattttggtcagactggcgactcagagtcagtccccgatccacaacctctcggagaacctccagcaacccccgctgctgtgggacctactacaatggcttcaggcggtggcgcaccaatggcagacaataacgaaggcgccgacggagtgggtaatgcctcaggaaattggcattgcgattccacatggctgggcgacagagtcatcaccaccagcacccgcacctgggccttgcccacctacaataaccacctctacaagcaaatctccagtgcttcaacgggggccagcaacgacaaccactacttcggctacagcaccccctgggggtattttgatttcaacagattccactgccactttccaccacgtgactggcagcgactcatcaacaacaattggggattccggcccaagagactcaacttcaaactcttcaacatccaagtcaaggaggtcacgtcgaatgatggcgtcacaaccatcgctaataaccttaccagcacggttcaagtcttctcggactcggagtaccagcttccgtacgtcctcggctctgcgcaccagggctgcctccctccgttcccggcggacgtgttcatgattccgcaatacggctacctgacgctcaacaatggcagccaagccgtgggacgttcatccttttactgcctggaatatttcccttctcagatgctgagaacgggcaacaactttaccttcagctacacctttgaggaagtgcctttccacagcagctacgcgcacagccagagcctggaccggctgatgaatcctctcatcgaccaatacctgtattacctgaacagaactcaaaatcagtccggaagtgcccaaaacaaggacttgctgtttagccgtgggtctccagctggcatgtctgttcagcccaaaaactggctacctggtccctgttatcggcagcagcgcgtttctaaaacaaaaacagacaacaacaacagcaattttacctggactggtgcttcaaaatataacctcaatgggcgtgaatccatcatcaaccctggcactgctatggcctcacacaaagacgacgaagacaagttctttcccatgagcggtgtcatgatttttggaaaagagagcgccggagcttcaaacactgcattggacaatgtcatgattacagacgaagaggaaattaaagccactaaccctgtggccaccgaaagatttgggaccgtggcagtcaatttccagagcagcagcacagaccctgcgaccggagatgtgcatgctatgggagcattacctggcatggtgtggcaagatagagacgtgtacctgcagggtcccatttgggccaaaattcctcacacagatggacactttcacccgtctcctcttatgggcggctttggactcaagaacccgcctcctcagatcctcatcaaaaacacgcctgttcctgcgaatcctccggcggagttttcagctacaaagtttgcttcattcatcacccaatactccacaggacaagtgagtgtggaaattgaatgggagctgcagaaagaaaacagcaagcgctggaatcccgaagtgcagtacacatccaattatgcaaaatctgccaacgttgattttactgtggacaacaatggactttatactgagcctcgccccattggcacccgttaccttacccgtcccctg

SEQ ID NO: 659 - DNA, 2208 bp, Artificial Sequence
  Description of Artificial Sequence: Synthetic polynucleotide
atggctgccgatggttatcttccagattggctcgaggacaacctctctgagggcattcgcgagtggtgggacttgaaacctggagccccgaagcccaaagccaaccagcaaaagcaggacgacggccggggtctggtgcttcctggctacaagtacctcggacccttcaacggactcgacaagggggagcccgtcaacgcggcggacgcagcggccctcgagcacgacaaggcctacgaccagcagctcaaagcgggtgacaatccgtacctgcggtataaccacgccgacgccgagtttcaggagcgtctgcaagaagatacgtcttttgggggcaacctcgggcgagcagtcttccaggccaagaagcgggttctcgaacctctcggtctggttgaggaaggcgctaagacggctcctggaaagaaacgtccggtagagcagtcgccacaagagccagactcctcctcgggcatcggcaagacaggccagcagcccgctaaaaagagactcaattttggtcagactggcgactcagagtcagtccccgatccacaacctctcggagaacctccagcaacccccgctgctgtgggacctactacaatggcttcaggcggtggcgcaccaatggcagacaataacgaaggcgccgacggagtgggtaatgcctcaggaaattggcattgcgattccacatggctgggcgacagagtcatcaccaccagcacccgcacctgggccttgcccacctacaataaccacctctacaagcaaatctccagtgcttcaacgggggccagcaacgacaaccactacttcggctacagcaccccctgggggtattttgatttcaacagattccactgccacttttcaccacgtgactggcagcgactcatcaacaacaattggggattccggcccaagagactcaacttcaaactcttcaacatccaagtcaaggaggtcacgacgaatgatggcgtcacaaccatcgctaataaccttaccagcacggttcaagtcttctcggactcggagtaccagcttccgtacgtcctcggctctgcgcaccagggctgcctccctccgttcccggcggacgtgttcatgattccgcaatacggctacctgacgctcaacaatggcagccaagccgtgggacgttcatccttttactgcctggaatatttcccttctcagatgctgagaacgggcaacaactttaccttcagctacacctttgaggaagtgcctttccacagcagctacgcgcacagccagagcctggaccggctgatgaatcctctcatcgaccaatacctgtattacctgaacagaactcaaaatcagtccggaagtgcccaaaacaaggacttgctgtttagccgtgggtctccagctggcacgtctgttcagcccaaaaactggctacctggaccctgttatcggcagcagcgcgtttctaaaacaaaaacagacaacaacaacagcaattttacctggactggtgcttcaaaatataacctcaatgggcgtgaatccatcatcaaccctggcactgctatggcctcacacaaagacgacgaagacaagttctttcccatgagcggtgtcatgatttttggaaaagagagcgccggagcttcaaacactgcattggacaatgtcatgattacagacgaagaggaaattaaagccactaaccctgtggccaccgaaagatttgggaccgtggcagtcaatttccagagcagcagcacagaccctgcgaccggagatgtgcatgctatgggagcattacctggcatggtgtggcaagatagagacgtgtacctgcagggtcccatttgggccaaaattcctcacacagatggacactttcacccgtctcctcttatgggcggctttggactcaagaacccgcctcctcagatcctcatcaaaaacacgcctgttcctgcgaatcctccggcggagttttcagctacaaagtttgcttcattcatcacccaatactccacaggacaagtgagtgtggaaattgaatgggagctgcagaaagaaaacagcaagcgctggaatcccgaagtgcagtacacatccaattatgcaaaatctgccaacgttgattttactgtggacaacaatggactttatactgggcctcgccccattggcacccgttaccttacccgtcccctg

SEQ ID NO: 660 - DNA, 2208 bp, Artificial Sequence
  Description of Artificial Sequence: Synthetic polynucleotide
atggctgccgatggttatcttccagattggctcgaggacaacctctctgagggcattcgcgagtggtgggacttgaaacctggagccccgaagcccaaagccaaccagcaaaagcaggacgacggccggggtctggtgcttcctggctacaagtacctcggacccttcaacggactcgacaagggggagcccgtcaacgcggcggacgcagcggccctcgagcacgacaaggcctacgaccagcagctcaaagcgggtgacaatccgtacctgcggtataaccacgccgacgccgagtttcaggagcgtctgcaagaagatacgtcttttgggggcaacctcgggcgagcagtcttccaggccaagaagcgggttctcgaacctctcggtctggttgaggaaggcgctaagacggctcctggaaagaaacgtccggtagagcagtcgccacaagagccagactcctcctcgggcatcggcaagacaggccagcagcccgctaaaaagagactcaattttggtcagactggcgactcagagtcagtccccgatccacaacctctcggagaacctccagcaacccccgctgctgtgggacctactacaatggcttcaggcggtggcgcaccaatggcagacaataacgaaggcgccgacggagtgggtaatgccccaggaaattggcattgcgactccacatggctgggcgacagagtcatcaccaccagcacccgcacctgggccttgcccacctacaataaccacctctacaagcaaatctccagtgcttcaacgggggccagcaacgacaaccactacttcggctacagcaccccctgggggtattttgatttcaacagattccactgccacttttcaccacgtgactggcagcgactcatcaacaacaattggggattccggcccaagagactcaacttcaaactcttcaacatccaagtcaaggaggtcacgacgaatgatggcgtcacaaccatcgctaataaccttaccagcacggttcaagtcttctcggactcggagtaccagcttccgtacgtcctcggctctgcgcaccagggctgcctccctccgttcccggcggacgtgttcatgattccgcaatacggctacctgacgctcaacaatggcagccaagccgtgggacgttcatccttttactgcctggaatatttcccttctcagatgctgagaacgggcaacaactttaccttcagctacacctttgaggaagtgcctttccacagcagctacgcgcacagccagagcctggaccggctgatgaatcctctcatcgaccaatacctgtattacctgaacagaactcaaaatcagtccggaagtgcccaaaacaaggacttgctgtttagccgtgggtctccagctggcatgtctgttcagcccaaaaactggctacctggaccctgttatcggcagcagcgcgtttctaaaacaaaaacagacaacaacaacagcaattttacctggactggtgcttcaaaatataacctcaatgggcgtgaatccatcatcaaccctggcacagctatggcctcacacaaagacgacgaagacaagttctttcccatgagcggtgtcatgatttttggaaaagagagcgccggagcttcaaacactgcattggacaatgtcatgattacaggcgaagaggaaattaaagccactaaccctgtggccaccgaaagatttgggaccgtggcagtcaatttccagagcagcagcacagaccctgcgaccggagatgtgcatgctatgggagcattacctggcatggtgtggcaagatagagacgtgtacctgcagggtcccatttgggccaaaattcctcacacagatggacactttcacccgtctcctcttatgggcggctttggactcaagaacccgcctcctcagatcctcatcaaaaacacgcctgttcctgcgaatcctccggcggagttttcagctacaaagtttgcttcattcatcacccaatactccacaggacaagtgagtgtggaaattgaatgggagctgcagaaagaaaacagcaagcgctggaatcccgaagtgcagtacacatccaattatgcaaaatctgccaacgttgattttactgtggacaacaatggactttatactgagcctcgccccattggcacccgttaccttacccgtcccctg

SEQ ID NO: 661 - DNA, 2208 bp, Artificial Sequence
  Description of Artificial Sequence: Synthetic polynucleotide
atggctgccgatggttatcttccagattggctcgaggacaacctctctgagggcattcgcgagtggtgggacttgaaacctggagccccgaagcccaaagccaaccagcaaaagcaggacgacggccggggtctggtgcttcctggctacaagtacctcggacccttcaacagactcgacaagggggagcccgtcaacgcggcggacgcagcggccctcgagcacgacaaggcctacgaccagcagctcaaagcgggtgacaatccgtacctgcggtataaccacgccgacgccgagtttcaggagcgtctgcaagaagatacgtcttttgggggcaacctcgggcgagcagtcttccaggccaagaagcgggttctcgaacctctcggtctggttgaggaaggcgctaagacggctcctggaaggaaacgtccggtagagcagtcgccacaagagccagactcctcctcgggcatcggcaagacaggccagcagcccgctaaaaagagactcaattttggtcagactggcgactcagagtcagtccccgatccacaacctctcggagaacctccagcaacccccgctgctgtgggacctactacaatggcttcaggcggtggcgcgccaatggcagacaataacgaaggcgccgacggagtgggtaatgcctcaggaaattggcattgcgattccacatggctgggcgacagagtcatcaccaccagcacccgcacctgggccttgcccacctacaataaccacctctacaagcaaatctccagtgcttcaacgggggccagcaacgacaaccactacttcggctacagcaccccctgggggtattttgatttcaacagattccactgccacttttcaccacgtgactggcagcgactcatcaacaacaattggggattccggcccaagagactcaacttcaaactcttcaacatccaagtcaaggaggtcacgacgaatgatggcgtcacaaccatcgctaataaccttaccagcacggttcaagtcttctcggactcggagtaccagcttccgtacgtcctcggctctgcgcaccagggctgcctccctccgttcccggcggacgtgttcatgattccgcaatacggctacctgacgctcaacaatggcggccaagccgtgggacgttcatccttttactgcctggaatatttcccttctcagatgctgagaacgggcaacaactttaccttcagctacacctttgaggaagtgcctttccacagcagctacgcgcacagccagagcctggaccggctgatgaatcctctcatcgaccaatacctgtattacctgaacagaactcaaaatcagtccggaagtgcccaaaacaaggacttgctgtttagccgtgggtctccagctggcatgtctgttcagcccaaaaactggctacctggaccctgttatcggcagcagcgcgtttctaaaacaaaaacagacaacaacaacagcaattttacctggactggtgcttcaaaatatagcctcaatgggcgtgaatccatcatcaaccctggcactgctatggcctcacacaaagacgacgaagacaagttctttcccatgggcggtgtcatgatttttggaaaagagagcgccggagcttcaaacactgcattggacaatgccatgattacagacgaagaggaaattaaagccactaaccctgtggccaccgaaagatttgggaccgtggcagtcaatttccagagcagcagcacagaccctgcgaccggagatgtgcatgctatgggagcattacctggcatggtgtggcaagatagagacgtgtacctgcagggtcccatttgggccaaaattcctcacacagatggacactttcacccgtctcctcttatgggcggctttggactcaagaacccgcctcctcagatcctcatcaaaaacacgcctgttcctgcgaatcctccggcggagttttcagctacaaagtttgcttcattcatcacccaatactccacaggacaagtgagtgtggaaattgaatgggagctgcagaaagaaaacagcaagcgctggaatcccgaagtgcagtacacatccaattatgcaaaatctgccaacgttgattttactgtggacaacaatggactttatactgagcctcgccccattggcacccgttaccttacccgtcccctg

SEQ ID NO: 662 - DNA, 2208 bp, Artificial Sequence
  Description of Artificial Sequence: Synthetic polynucleotide
atggctgccgatggttatcttccagattggctcgaggacaacctctctgagggcattcgcgagtggtgggacttgaaacctggagccccgaagcccaaagccaaccagcaaaagcaggacgacggccggggtctggtgcttcctggctacaagtacctcggacccttcaacggactcgacaagggggagcccgtcaacgcggcggacgcagcggccctcgagcacgacaaggcctacgaccagcagctcaaagcgggtgacaatccgtacctgcggtataaccacgccgacgccgagtttcaggagcgtctgcaagaagatacgtcttttgggggcaacctcgggcgagcagtcttccaggccaagaagcgggttctcgaacctctcggtctggttgaggaaggcgctaagacggctcctggaaagaaacgtccggtagagcagtcgccacaagagccagactcctcctcgggcatcggcaagacaggccagcagcccgctaaaaagagactcaattttggtcagactggcgactcagagtcagtccccgatccacaacctctcggagaacctccagcaacccccgctgctgtgggacctactacaatggcttcaggcggtggcgcaccaatggcagacaataacgaaggcgccgacggagtgggtaatgcctcaggaaattggcattgcgattccacatggctgggcggcagagtcatcaccaccagcacccgcacctgggccttgcccacctacaataaccacctctacaagcaaatctccagtgcttcaacgggggccagcaacgacaaccactacttcggctacagcaccccctgggggtattttgatttcaacagattccactgccacttttcaccacgtgactggcagcgactcatcaacaacaattggggattccggcccaagagactcaacttcaaactcttcaacatccaagtcaaggaggtcacgacgaatgatggcgtcacaaccatcgctaataaccttaccagcacggttcaagtcttctcggactcggagtaccagcttccgtacgtcctcggctctgcgcaccagggctgcctccctccgttcccggcggacgtgttcatgattccgcaatacggctacctgacgctcaacaatggcagccaagccgtgggacgttcatccttttactgcctggaatatttcccttctcagatgctgagaacgggcaacaactctaccttcagctacacctttgaggaagtgcctttccacagcagctacgcgcacagccagagcctggaccggctgatgaatcctctcatcgaccaatacctgtattacctgaacagaactcaaaatcagtccggaagtgcccaaaacaaggacttgctgtttagccgtgggtctccagctggcatgtctgttcagcccaaaaactggctacctggaccctgttatcggcagcagcgcgtttctaaaacaaaaacagacaacaacaacagcaattttacctggactggtgcttcaaaatataacctcaatgggcgtgaatccatcatcaaccctggcactgctatggcctcacacaaagacgacgaagacaagttctttcccatgagcggtgtcatgatttttggaaaagagagcgccggagcttcaaacactgcattggacaatgtcatgattacagacgaagaggaaattaaagccactaaccctgtggccaccgaaagatttgggaccgtggcagtcaatttccagagcagcagcacagaccctgcgaccggagatgtgcatgctatgggaacattacctggcatggtgtggcaagatagagacgtgtacctgcagggtcccatttgggccaaaattcctcacacagatggacactttcacccgtctcctcttatgggcggctttggactcaagaacccgcctcctcagatcctcatcaaaaacacgcctgttcctgcgaatcctccggcggagttttcagctacaaagtttgcttcattcatcacccaatactccacaggacaagtgagtgtggaaattgaatgggagctgcagaaagaaaacagcaagcgctggaatcccgaagtgcagtacacatccaattatgcaaaatctgccaacgttgattttactgtggacaacaatggactttatactgagcctcgccccattggcacccgttaccttacccgtcccctg

SEQ ID NO: 663 - DNA, 2208 bp, Artificial Sequence
  Description of Artificial Sequence: Synthetic polynucleotide
atggctgccgatggttatctcccagattggctcgaggacaacctctctgagggcattcgcgagtggtgggacttgaaacctggagccccgaagcccaaagccaaccagcaaaagcaggacgacggccggggtctggtgcttcctggctacaagtacctcggacccttcaacggactcgacaagggggagcccgtcagcgcggcggacgcagcggccctcgagcacgacaaggcctacgaccagcagctcaaagcgggtgacaatccgtacctgcggtataaccacgccgacgccgagtttcaggagcgtctgcaagaagatacgtcttttgggggcaacctcgggcgagcagtcttccaggccaagaagcgggttctcgaacctctcggtctggttgaggaaggcgctaagacggctcctggaaagaaacgtccggtagagcagtcgccacaagagccagactcctcctcgggcatcggcaagacaggccagcagcccgctaaagagagactcaattttggtcagactggcgactcagagtcagtccccgatccacaacctctcggagaacctccagcaacccccgctgctgtgggacctactacaatggcttcaggcggtggcgcaccaatggcagacaataacgaaggcgccgacggagtgggtaatgcctcaggaaattggcattgcgattccacatggctgggcgacagagtcatcaccaccagcacccgcacctgggccttgcccacctacaataaccacctctacaagcaaatctccagtgcttcaacgggggccagcaacgacaaccactacttcggctacagcaccccctgggggtattttgatttcaacagattccactgccacttttcaccacgtgactggcagcgactcatcaacaacaattggggattccggcccaagagactcaacttcaaactcttcaacatccaagtcaaggaggtcacgacgaatgatggcgtcacaaccatcgccaataaccttaccagcacggttcaagtcttctcggactcggagtaccagcttccgtacgtcctcggctctgcgcaccagggctgcctccctccgttcccggcggacgtgttcatgattccgcaatacggctacctgacgctcaacaatggcagccaagccgtgggacgttcatccttttactgcctggaatatttcccttctcagatgctgagaacgggcaacaactttaccttcagctacacctttgaggaagtgcctttccacagcagctacgcgcacagccagagcctggaccggctgatgaatcctctcatcgaccaatacctgtattacctgaacagaactcaaaatcagtccggaagtgcccaaaacaaggacttgctgtttagccgtgggtctccagctggcatgtctgttcagcccaaaaactggctacctggaccctgttatcggcagcagcgcgtttctaaaacaaaaacagacaacaacaacagcaattttacctggactggtgcttcaaaatataacctcaatgggcgtgaatccatcatcaaccctggcactgctatggcctcacacaaagacgacgaagacaagttctttcccatgagcggtgtcatgatttttggaaaagagagcgccggagcttcaaacactgcattggacaatgtcatgattacagacgaagaggaaattaaagccactaaccctgtggccaccgaaagatttgggaccgtggcagtcaatttccagagcagcagcacagaccctgcgaccggagatgtgcatgctatgggagcattacctggcatggtgtggcaagatagagacgtgtacctgcagggtcccatttgggccaaaattcctcacacagatggacactttcacccgtctcctcttatgggcggctttggactcaagaacccgcctcctcagatcctcatcaaaaacacgcctgttcctgcgaatcctccggcggagttttcagctacaaagtttgcttcattcatcacccaatactccacaggacaagtgagtgtggaaattgaatgggagctgcagaaagaaaacagcaagcgctggaatcccgaagtgcagtacacatccaattatgcaaaatctgccaacgttgattttactgtggacaacaatggactttatactgagcctcgccccattggcacccgttaccttacccgtcccctg

SEQ ID NO: 664 - DNA, 2208 bp, Artificial Sequence
  Description of Artificial Sequence: Synthetic polynucleotide
atggctgccgatggttatcttccagattggctcgaggacaacctctctgagggcattcgcgagtggtgggacttgaaacctggagccccgaagcccaaagccaaccagcaaaagcaggacgacggccggggtctggtgcttcctggctacaagtacctcggacccttcaacggactcgacaagggggagcccgtcaacgcggcggacgcagcggccctcgagcacgacaaggcctacgaccagcagctcaaagcgggtgacaatccgtacctgcggtataaccacgccgacgccgagtttcaggagcgtctgcaagaagatacgtcttttgggggcaacctcgggcgagcagtcttccaggccaagaagcgggttctcgaacctctcggtctggttgaggaaggcgctaagacggctcctggaaagaaacgtccggtagagcagtcgccacaagagccagactcctcctcgggcatcggcaagacaggccagcagcccgctaaaaagagactcaattttggtcagactggcgactcagagtcagtccccgatccacaacctctcggagaacctccagcaacccccgctgctgtgggacctactacaatggcttcaggcggtggcgcaccaatggcagacaataacgaaggcgccgacggagtgggtaatgcctcaggaaattggcattgcgattccacatggctgggcgacagagtcatcaccaccagcacccgcacctgggccttgcccacctacaataaccacctctacaagcaaatctccagtgcttcaacgggggccagcaacgacaaccactacttcggctacagcaccccctgggggtattttgatttcaacagattccactgccacttttcaccacgtgactggcagcgactcatcaacaacaattggggattccggcccaagagactcaacttcaaactcttcaacatccaagtcaaggaggtcacgacgaatgatggcgtcacaaccatcgctaataaccttaccagcacggttcaagtcttctcggactcggagtaccagcttccgtacgtcctcggctctgcgcaccagggctgcctccctccgttcccggcggacgtgttcatgattccgcaatacggctacctgacgctcaacaatggcagccaagccgtgggacgttcatccttttactgcctggaatatttcccttctcagatgctgagaacgggcaacaactttaccttcagctacacctttgaggaagtgcctttccacagcagctacgcgcacagccagagcctggaccggctgatgaatcctctcatcgaccaatacctgtattacctgaacagaactcaaaatcagtccggaagtgcccaaaacaaggacttgctgtttagccgtgggtctccagctggcatgtctgttcagcccaaaaactggctacctggaccctgttatcggcagcagcgcgtttctaaaacaaaaacagacaacaacaacagcaattttacctggactggtgcttcaaaatataacctcaatgggcgtgaatccatcatcaaccctggcactgctatggcctcacacaaagacgacgaagacaagttctttcccatgagcggtgtcatgatttttggaaaagagagcgccggagcttcaaacactgcattggacaatgtcatgattacagacgaaggggaaattaaagccactaaccctgtggccaccgaaagatttgggaccgtggcagtcaatttccagagcagcagcacagaccctgcgaccggagatgtgcatgctatgggagcattacctggcatggtgtggcaagatagagacgtgtacctgcagggtcccatttgggccaaaattcctcacacagatggacactttcacccgtctcctcttatgggcggctttggactcaagaacccgcctcctcagatcctcatcaaaaacacgcctgttcctgcgaatcctccggcggagttttcagctacaaagtttgcttcattcatcacccaatactccacaggacaagtgagtgtggaaattgaatgggagctgcagaaagaaaacagcaagcgctggaatcccgaagtgcagtacacatccaattatgcaaaatctgccaacgttgattttactgtggacaacaatggactttatactgagcctcgccccattggcacccgttaccttacccgtcccctg

SEQ ID NO: 665 - DNA, 2208 bp, Artificial Sequence
  Description of Artificial Sequence: Synthetic polynucleotide
atggctgccgatggttatcttccagattggctcgaggacaacctctctgagggcattcgcgagtggtgggacttgaaacctggagccccgaaacctaaagccaaccagcaaaagcaggacgacggccggggtctggtgcttcctggctacaagtacctcggacccttcaacggactcgacaagggggagcccgtcaacgcggcggacgcagcggccctcgagcacgacaaggcctacgaccagcagctcaaagcgggtgacaatccgtacctgcggtataaccacgccgacgccgagtttcaggagcgtctgcaagaagatacgtcttttgggggcaacctcgggcgagcagtcttccaggccaagaagcgggttctcgaaccttttggtctggttgaggaaggcgctaagacggctcctggaaagaaacgtccggtagagcagtcgccacaagagccagactcctcctcgggcatcggcaagacaggccagcagcccgctaaaaagagactcaattttggtcagactggcgactcagagtcagtccccgacccacaacctctcggagaacctccagcaacccccgctgctgtgggacctactacaatggcttcaggcggtggcgcaccaatggcagacaataacgaaggcgccgacggagtgggtaatgcctcaggaaattggcattgcgattccacatggctgggcgacagagtcatcaccaccagcacccgcacctgggccttgcccacctacaataaccacctctacaagcaaatctccagtgcttcaacgggggccagcaacgacaaccactacttcggctacagcaccccctgggggtattttgatttcaacagattccactgccacttttcaccacgtgactggcagcgactcatcaacaacaattggggattccggcccaagagactcaacttcaagctcttcaacatccaagtcaaggaggtcacgacgaacgatggcgtcacgaccatcgctaataaccttaccagcacggttcaagtcttctcggattcagagtaccaactgccgtacgtcctcggctctgcgcaccagggctgcctccctccgttcccggcggacgtgtttatgattccgcagtacggctacctaacgctcaacaatggcagccaggccgtgggacgttcatccttttactgcccggaatatttcccttctcagatgctgagaacgggcaacaactttaccttcagctacacctttgaggaagtgcctttccacagcagctacgcgcacagccagagcctggaccggctgatgaatcctctcatcgaccaatacctgtattacctgaacagaactcaaaatcagtccggaagtgcccaaaacaaggacttgctgtttagccgtgggtctccagctggcatgtctgttcagcccaaaaactggctacctggaccctgttatcggcagcagcgcgtttctaaaacaaaaacagacaacaacaacagcaattttacctggactggtgcttcaaaatataacctcaatgggcgtgaatccatcatcaaccctggcactgctatggcctcacacaaagacgacaaagacaagttctttcccatgagcggtgtcatgatttttggaaaagagagcgccggagcttcaaatactgcattggacaatgtcatgatcacagatgaagaggaaattaaagccactaaccctgtggccaccgaaagatttgggaccgtggcagtcaatttccagagcagcaacacagaccccgcgaccggagatgtgcatgttatgggagccttacctggcatggtgtggcaagacagagacgtatacctgcagggtcccatttgggccaaaattcctcacacggatggacactttcacccgtctcctctcatgggcggctttggacttaagcacccgcctcctcaaatcctcatcaaaaacacgcctgttcctgcgaatcctccggcagagttttcggctacaaagtttgcttcattcatcacccagtactccacaggacaagtgagtgtggaaattgaatgggagctgcagaaagaaaacagcaagcgctggaatcccgaagtgcagtacacatccaattatgcaaaatctgccaacgttgatttcactgtggacaacaatggactttatactgagcctcgccccattggcacccgttaccttacccgtcccttg

SEQ ID NO: 666 - DNA, 2208 bp, Artificial Sequence
  Description of Artificial Sequence: Synthetic polynucleotide
atggctgccgatggttatcttccagattggctcgaggacaacctctctgagggcattcgcgagtggtgggacttgaaacctggagccccgaaacctaaagccaaccagcaaaagcaggacgacggccggggtctggtgcttcctggctacaagtacctcggacccttcaacggactcgacaagggggagcccgtcaacgcggcggacgcagcggccctcgagcacgacaaggcctacgaccagcagctcaaagcgggtgacaatccgtacctgcggtataaccacgccgacgccgagtttcaggagcgtctacaagaagatacgtcttttgggggcaacctcgggcgagcagtcttccaggccaagaagcgggttctcgaaccttttggtctggttgaggaaggcgctaagacggctcctggaaagaaacgtccggtagagcagtcgccacaagagccagactcctcctcgggcatcggcaagacaggccagcagcccgctaaaaagagactcaattttggtcagactggcgactcagagtcagtccccgacccacaacctctcggagaacctccagcaacccccgctgctgtgggacctactacaatggcttcaggcggtggcgcaccaatggcagacaataacgaaggcgccgacggagtgggtaatgcctcaggaaattggcattgcgattccacatggctgggcgacagagtcatcaccaccagcacccgcacctgggccttgcccacctacaataaccacctctacaagcaaatctccagtgcttcaacgggggccagcaacgacaaccactacttcggctacagcaccccctgggggtattttgatttcaacagattccactgccacttttcaccacgtgactggcagcgactcatcaacaacaattggggattccggcccaagagactcaacttcaagctcttcaacatccaagtcaaggaggtcacgacgaacgatggcgtcacgaccatcgctaataaccttaccagcacggttcaagtcttctcggattcagagtaccaactgccgtacgtcctcggctctgcgcaccagggctgcctccctccgttcccggcggacgtgttcatgattccgcagtacggctacctaacgctcaacaatggcagccaggccgtgggacgttcatccttttactgcctggaatatttcccttctcagatgctgagaacgggcaacaactttaccttcagctacacctttgaggaagtgcctttccacagcagctacgcgcacagccagagcctggaccggctgatgaatcctctcatcgaccaatacctgtattacctgaacagaactcaaaatcagtccggaagtgcccaaaacaaggacttgctgtttagccgtgggtctccagctggcatgtctgttcagcccaaaaactggctacctggaccctgttatcggcagcagcgcgtttctaaaacaaaaacagacaacaacaacagcaattttacctggactggtgcttcaaaatataacctcaatgggcgtgaatccatcatcaaccctggcactgctatggcctcacacaaagacgacaaagacaagttctttcccatgagcggtgtcatgatttttggaaaagagagcgccggagcttcaaatactgcattggacaatgtcatgatcacagatgaagaggaaattaaagccactaaccctgtggccaccgaaagatttgggaccgtggcagtcaatttccagagcagcgacacagaccccgcgaccggagatgtgcatgttatgggagccttacctggcatggtgtggcaagacagagacgtatacctgcagggtcccatttgggccaaaattcctcacacggatggacactttcacccgtctcctctcatgggcggctttggacttaagcacccgcctcctcaaatcctcatcaaaaacacgcctgttcctgcgaatcctccggcagagttttcggctacaaagtttgcttcattcatcacccagtactccacaggacaagtgagtgtggaaattgaatgggagctgcagaaagaaaacagcaagcgctggaatcccgaagtgcagtacacatccaattatgcaaaatctgccaacgttgatttcactgtggacaacaatggactttatactgagcctcgccccattggcacccgttaccttacccgtcccttg

SEQ ID NO: 667 - DNA, 2208 bp, Artificial Sequence
  Description of Artificial Sequence: Synthetic polynucleotide
atggctgccgatggttatcttccagattggctcgaggacaacctctctgagggcattcgcgagtggtgggacttgaaacctggagccccgaaacctaaagccaaccagcaaaagcagggcgacggccggggtctggtgcttcctggctacaagtacctcggacccttcaacggactcgacaagggggagcccgtcaacgcggcggacgcagcggccctcgagcacgacaaggcctacgaccagcagctcaaagcgggtgacaatccgtacctgcggtataaccacgccgacgccgagtttcaggagcgtctgcaagaagatacgtcttttgggggcaacctcgggcgagcagtcttccaggccaagaagcgggttctcgaaccttttggtctggttgaggaaggcgctaagacggctcctggaaagaaacgtccggtagagcagtcgccacaagagccagactcctcctcgggcatcggcaagacaggccagcagcccgctaaaaagagactcaattttggtcagactggcgactcagagtcagtccccgacccacaacctctcggagaacctccagcaacccccgctgctgtgggacctactacaatggcttcaggcggtggcgcaccaatggcagacaataacgaaggcgccgacggagtgggtaatgcctcaggaaattggcattgcgattccacatggctgggcgacagagtcatcaccaccaacactcgcacctgggccttgcccacctacaataaccacctctacaagcaaatctccagtgcttcaacgggggccagcaacgacaaccactacttcggctacagcaccccctgggggtattttgatttcaacagattccactgccacttttcaccacgtgactggcagcgactcatcaacaacaattggggattccggcccaagagactcaacttcaagctcttcaacatccaagtcaaggaggtcacgacgaacgatggcgtcacgaccatcgctaataaccttaccagcacggttcaagtcttctcggattcagagtaccaactgccgtacgtcctcggctctgcgcaccagggctgcctccctccgttcccggcggacgtgttcatgattccgcagtacggctacctaacgctcaacaatggcagccaggccgtgggacgttcatccttttactgcctggaatatttcccttctcagatgctgagaacgggcaacaactttaccttcagctacacctttgaggaagtgcctttccacagcagttacgggcacagccagagcctggaccggctgatgaatcttctcatcgaccaatacctgtattacctgaacagaactcaaaatcagtccggaagtgcccaaaacaaggacttgctgtttagccgtgggtctccagctggcatgtttgttcagcccaaaaactggctacctggaccctgttatcggcagcagcgcgtttctaaaacaaaaacagacaacaacaacagcaattttacctggactggtgcttcaaaatataacctcaatgggcgtgaatccatcatcaaccctggcactgctatggcctcacacaaagacgacgaagacaagttctttcccatgagcggtgtcatgatttttggaaaagagagcgccggagcttcaaatactgcattggacaatgtcatgatcacagatgaagaggaaattaaagccactaaccctgtggccaccgaaagatttgggaccgtggcagtcaatttccagagcagcagcacagaccccgcgaccggagatgtgcatgttatgggagccttacctggcatggtgtggcaagacagagacgtatacctgcagggtcccatttgggccaaaattcctcacacggatggacactttcacccgtctcctctcatgggcggctttggacttaagcacccgcctcctcaaatcctcatcaaaaacacgcctgttcctgcgaatcctccggcagagttttcggctacaaagtttgcttcattcatcacccagtactccacaggacaagtgagtgtggaaattgaatgggagctgcagaaagaaaacagcaagcgctggaatcccgaagtgcagtacacatccaattatgcaaaatctgccaacgttgatttcactgtggacaacaatggactttatactgagcctcgccccattggcacccgttaccttacccgtcccttg

SEQ ID NO: 668 - DNA, 2208 bp, Artificial Sequence
  Description of Artificial Sequence: Synthetic polynucleotide
atggctgccgatggttatcttccagattggctcgaggacaacctctctgagggcattcgcgagtggtgggacttgaaacctggagccccgaaacctaaagccaaccagcaaaagcaggacgacggccggggtctggtgcttcctggctacaagtacctcggacccttcaacggactcgacaagggggagcccgtcaacgcggcggacgcagcggccctcgagcacgacaaggcctacgaccagcagctcaaagcgggtgacaatccgtacctgcggtataaccacgccgacgccgagtttcaggagcgtctgcaagaagatacgtcttttgggggcaacctcgggcgagcagtcttccaggccaagaagcgggttctcgaaccttttggtctggttgaggaaggcgctaagacggctcctggaaagaaacgtccggtagagcagtcgccacaagagccagactcctcctcgggcatcggcaagacaggccagcagcccgctaaaaagagactcaattttggtcagactggcgactcagagtcagtccccgacccacaacctctcggagaacctccagcaacccccgctgctgtgggacctactacaatggcttcaggcggtggcgcaccaatggcagacaataacgaaggcgccgacggagtgggtaatgcctcaggaaattggcattgcgattccacatggctgggcgacagagtcatcaccaccaacacccgcacctgggccttgcccacctacaataaccacctctacaagcaaatctccagtgcttcaacgggggccagcaacgacaaccactacttcggctacagcaccccctgggggtattttgatttcaacagattccactgccacttttcaccacgtgactggcagcgactcatcaacaacaattggggattccggcccaagagactcaacttcaagctcttcaacatccaagtcaaggaggtcacgacgaacgatggcgtcacgaccatcgctaataaccttaccagcacggttcaagtcttctcggattcagagtaccaactgccgtacgtcctcggctctgcgcaccagggctgcctccctccgttcccggcggacgtgttcatgattccgcagtacggctacctaatgctcaacaatggcagccaggccgtgggacgttcatccttttactgcctggaatatttcccttctcagatgctgagaacgggcaacaactttaccttcagctacacctttgaggaagtgcctttccacagcagctacgcgcacagccagagcctggaccggctgatgaatcctctcatcgaccaatacctgtattacctgaacagaactcaaaatcagtccggaagtgcccaaaacaaggacttgctgtttagccgtgggtctccagctggcatgtctgttcagcccaaaaactggctacctggaccctgttatcggcagcagcgcgtttctaaaacaaaaacagacaacaacaacagcaattttacctggactggtgcttcaaaatataacctcaatgggcgtgaatccatcatcaaccctggcactgctatggcctcacacaaagacgacgaagacaagttctttcccatgagcggtgtcatgatttttggaaaagagagcgccggagcttcaaatactgcattggacaatgtcatgatcacagatgaagaggaaattaaagccactaaccctgcggccaccgaaagatttgggaccgtggcagtcaatttccagagcagcagcacagaccccgcgaccggagatgtgcatgttatgggagccttacctggcatggtgtggcaagacagagacgtatacctgcagggtcccatttgggccaaaattcctcacacggatggacactttcacccgtctcctctcatgggcggctttggacttaagcacccgcctcctcaaatcctcatcaaaaacacgcctgttcctgcgaatcctccggcagagttttcggctacaaagtttgcttcattcatcacccagtactccacaggacaagtgagtgtggaaattgaatgggagctgcagaaagaaaacagcaagcgctggaatcccgaagtgcagtacacatccaattatgcaaaatctgccaacgttgatttcactgtggacaacaatggactttatactgagcctcgccccattggcacccgttaccttacccgtcccttg

SEQ ID NO: 669 - DNA, 2208 bp, Artificial Sequence
  Description of Artificial Sequence: Synthetic polynucleotide
atggctgccgatggttatcttccagattggctcgaggacaacctctctgagggcattcgcgagtggtgggacttgaaacctggagccccgaaacctaaagccaaccagcaaaagcaggacgacggccggggtctggtgcttcctggctacaagtacctcggacccttcaacggactcgacaagggggagcccgtcaacgcggcggacgcagcggccctcgagcacgacaaggcctacgaccagcagctcaaagcgggtgacaatccgtacctgcggtataaccacgccgacgccgagtttcaggagcgtctgcaagaagatacgtcttttgggggcaacctcgggcgagcagtcttccaggccaagaagcgggttctcgaaccttttggtctggttgaggaaggcgctaagacggctcctggaaagaaacgtccggtagagcagtcgccacaagagccagactcctcctcgggcatcggcaagacgggccagcagcccgctaaaaagagactcaattttggtcagactggcgactcagagtcagtccccgacccacaacctctcggagaacctccagcaacccccgctgctgtgggacctactacaatggcttcaggcggtggcgcaccaatggcagacaataacgaaggcgccgacggagtgggtaatgcctcaggaaattggcattgcgattccacatggctgggcgacagagtcatcaccaccagcacccgcacctgggccttgcccacctacaataaccacctctacaagcaaatctccagtgcttcaacgggggccagcaacgacaaccactacttcggctacagcaccccctgggggtattttgatttcaacagattccactgccacttttcaccacgtgactggcagcgactcatcaacaacaattggggattccggcccaagagactcaacttcaagctcttcaacatccaagtcaaggaggtcacgacgaacgatggcgtcacgaccatcgctaataaccttaccagcacggttcaagtcttctcggattcagagtaccaactgccgtacgtcctcggctctgcgcaccagggctgcctccctccgttcccggcggacgtgttcatgattccgcagtacggctacctaacgctcaacaatggcagccaggccgtgggacgttcatccttttactgcctggaatatttcccttctcagatgctgagaacgggcaacaactttaccttcagctacacctttgaggaagtgcctttccacagcagctacgcgcacagccagagcctggaccggctgatgaatcctctcatcgaccaatacctgtattacctgaacagaactcaaaatcagtccggaagtgcccaaaacaaggacttgctgtttagccgtgggtctccagctggcatgtccgttcagcccaaaaactggctacctggaccctgttatcggcagcagcgcgtttctaaaacaaaaacagacaacaacaacagcaattttacctggactggtgcttcaaaatataacctcaatgggcgtgaatccatcatcaaccctggcactgctatggcctcacacaaagacgacgaagacaagttctttcccatgagcggtgtcatgatttttggaaaagagagcgccggagcttcaaatactgcattggacaatgtcatgatcacagatgaagaggaaattaaagccactaaccctgtggccaccgaaagatttgggaccgtggcagtcaatttccagagcagcagcacagaccccgcgaccggagatgtgcatgttatgggagccttacctggcatggtgtggcaagacagagacgtatacctgcagggtcccatttgggccaaaattcctcacacggatggacactttcacccgtctcctctcatgggcggctttggacttaagcacccgcctcctcaaatcctcatcaaaaacacgcctgttcctgcgaatcctccggcagagttttcggctacaaagtttgcttcattcatcacccagtactccacaggacaagtgagtgtggaaattgaatgggagctgcagaaagaaaacagcaagcgctggaatcccgaagtgcagtacacatccaattatgcaaaatctgccaacgttgatttcactgtggacaacaatggactttatactgagcctcgccccattggcacccgttaccttacccgtcccttg

SEQ ID NO: 670 - DNA, 2208 bp, Artificial Sequence
  Description of Artificial Sequence: Synthetic polynucleotide
  misc_feature (305)..(305): n is a, c, t, or g
atggctgccgatggttatcttccagattggctcgaggacaacctctctgagggcattcgcgagtggtgggacttgaaacctggagccccgaaacctaaagccaaccagcaaaagcaggacgacggccggggtctggtgcttcctggctacaagtacctcggacccttcaacggactcgacaagggggagcccgtcaacgcggcggacgcagcggccctcgagcacgacaaggcctacgaccagcagctcaaagcgggtgacaatccgtacctgcggtataaccacgccgacgccgagtttcaggngcgtctgcaagaagatacgtcttttgggggcaacctcgggcgagcagtcttccaggccaagaagcgggttctcgaaccttttggtctggttgaggaaggcgctaagacggctcctggaaagaaacgtccggtagagcagtcgccacaagagccagactcctcctcgggcatcggcaagacaggccagcagcccgctaaaaagagactcaattttggtcagactggcgactcagagtcagtccccgacccacaacctctcggagaacctccagcaacccccgctgctgtgggacctactacaatggcttcaggcggtggcgcaccaatggcagacaataacgaaggcgccgacggagtgggtaatgcctcaggaaattggcattgcgattccacatggctgggcggcagagtcatcaccaccagcacccgcacctgggccttgcccacctacaataaccacctctacaagcaaatctccagtgcttcaacgggggccagcaacgacaaccactacttcggccacagcaccccctgggggtattttgatttcaacagattccactgccacttttcaccacgtgactggcagcgactcatcaacaacaattggggattccggcccaagagactcaacttcaagctcttcaacatccaagtcaaggaggtcacgacgaacgatggcgtcacgaccatcgctaataaccttaccagcacggttcaagtcttctcggattcagagtaccaactgccgtacgtcctcggctctgcgcaccagggctgcctccctccgtccccggcggacgtgttcatgattccgcagtacggctacctaacactcaacaatggcagccaggccgtgggacgttcatccttttactgcctggaatatttcccttctcagatgctgagaacgggcaacaactttaccttcagctacacctttgaggaagtgcctttccacagcagctacgcgcacagccagagcctggaccggctgatgaatcctctcatcgaccaatacctgtattacctgaacagaactcaaaatcagtccggaagtgcccaaaacaaggacttgctgtttagccgtgggtctccagctggcatgtctgttcagcccaaaaactggctacctggaccctgttatcggcagcagcgcgtttctaaaacaaaaacagacaacaacaacagcaattttacctggactggtgcttcaaaatataacctcaatgggcgtgaatccatcatcaaccctggcactgctatggcctcacacaaagacgacaaagacaagttctttcccatgagcggtgtcatgatttttggaaaagagagcgccggagcttcaaatactgcattggacaatgtcatgatcacagatgaagaggaaattaaagccactaaccctgtggccaccgaaagatttgggaccgtggcagtcaatttccagagcagcaacacagaccccgcgaccggagatgtgcatgttatgggagccttacctggcatggtgtggcaagacagagacgtatacctgcagggtcccatttgggccaaaattcctcacacggatggacactttcacccgtctcctctcatgggcggctttggacttaagcacccgcctcctcaaatcctcatcaaaaacacgcctgttcctgcgaatcctccggcagagttttcggctacaaagtttgcttcattcatcacccagtactccacaggacaagtgagtgtggaaattgaatgggagctgcagaaagaaaacagcaagcgctggaatcccgaagtgcagtacacatccaattatgcaaaatctgccaacgttgatttcactgtggacaacaatggactttatactgagcctcgccccattggcacccgttaccttacccgtcccttg

SEQ ID NO: 671 - DNA, 2208 bp, Artificial Sequence
  Description of Artificial Sequence: Synthetic polynucleotide
atggctgccgatggttattttccagattggctcgaggacaacctttctgagggcattcgcgagtggtgggacttgaaacctggagccccgaaacctaaagccaaccagcaaaagcaggacgacggccggggtctggtgcttcctggctacaagtacctcggacccttcaacggactcgacaagggggagcccgtcaacgcggcggacgcagcggccctcgagcacgacaaggcctacgaccagcagctcaaagcgggtgacaatccgtacctgcggtataaccacgccgacgccgagtttcaggagcgtctgcaagaagatacgtcttttgggggcaacctcgggcgagcagtcttccaggccaagaagcgggttctcgaaccttttggtctggttgaggaaggcgctaagacggctcctggaaagaaacgtccggtagagcagtcgccacaagagccagactcctcctcgggcatcggcaggacaggccagcagcccgctaaaaagagactcaattttggtcagactggcgactcagagtcagtccccgacccacaacctctcggagaacctccagcgacccccgctgctgtgggacctactacaatggcttcaggcggtggcgcaccaatggcagacaataacgaaggtgccgacggagtgggtaatgcctcaggaaattggcattgcgattccacatggctgggcgacagagtcatcaccaccagcacccgcacctgggccttgcccacctacaataaccacctctacaagcaaatctccagtgcttcaacgggggccagcaacgacaaccactacttcggctacagcaccccctgggggtattttgatttcaacagattccactgccacttttcaccacgtgactggcagcgactcatcaacaacaattggggattccggcccaagagactcaacttcaagctcttcaacatccaagtcaaggaggtcacgacgaacgatggcgtcacgaccatcgctaataaccttaccagcacggttcaagtcttctcggattcagagtaccaactgccgtacgtcctcggctctgcgcaccagggctgcctccctccgttcccggcggacgtgttcatgattccgcagtacggctacctaacgctcaacaatggcagccaggccgtgggacgttcatccttttactgcctggaatatttcccttctcagatgctgagaacgggcaacaactttaccttcagctacacctttgaggaagtgcctttccacagcagctacgcgcacagccagagcctggaccggctgatgaatcctctcatcgaccaatacctgtattacctgaacagaactcaaaatcagtccggaagtgcccaaaacaaggacttgctgtttagccgtgggtctccagctggcatgtctgttcagcccaaaaactggctacctggaccctgttatcggcagcagcgcgtttctaaaacaaaaacagacaacaacaacagcaattttacctggactggtgcttcaaaatataacctcaatgggcgtgaatccatcatcaaccctggcactgctatggcctcacacaaagacgacgaagacaagttctttcccatgagcggtgtcatgatttttggaaaagagagcgccggagcttcaaatactgcattggacaatgtcatgatcacagatgaagaggaaattaaagccactaaccctgtggccaccgaaagatttgggaccgtggcagtcaatttccagagcagcagcccagaccccgcgaccggagatgtgcatgttatgggagccttacctggcatggtgtggcaagacagagacgtatacctgcagggtcccatttgggccaaaattcctcacacggatggacactttcacccgtctcctctcatgggcggctttggacttaagcacccgcctcctcaaatcctcatcaaaaacacgcctgttcctgcgaatcctccggcagagttttcggctacaaagtttgcttcattcatcacccagtactccacaggacaagtgagtgtggaaattgaatgggagctgcagaaagaaaacagcaagcgctggaatcccgaagtgcagtacacatccaattatgcaaaatctgccaacgttgatttcactgtggacaacaatggactttatagtgagcctcgccccattggcacccgttaccttacccgtcccttg

SEQ ID NO: 672 - DNA, 2208 bp, Artificial Sequence
  Description of Artificial Sequence: Synthetic polynucleotide
atggctgccgatggttatcttccagattggctcgaggacaacctctctgagggcattcgcgagtggtgggacttgaaacctggagccccgaaacctaaagccaaccagcaaaagcaggacgacggccggggtctggtgcttcctggctacaagtacctcggacccttcaacggactcgacaagggggagcccgtcaacgcggcggacgcagcggccctcgagcacgacaaggcctacgaccagcagctcaaagcgggtgacaatccgtacctgcggtataaccacgccgacgccgagtttcaggagcgtctgcaagaagatacgtcttttgggggcaacctcgggcgagcagtcttccaggccaagaagcgggttctcgaaccttttggtctggttgaggaaggcgctaagacggctcctggaaagaaacgtccggtagagcagtcgccacaagagccagactcctcctcgggcatcggcaagacaggccagcagcccgctaaaaagagactcaattttggtcagactggcgactcagagtcagtccccgacccacaacctctcggagaacctccagcaacccccgctgctgtgggacctactacaatggcttcaggcggtggcgcaccaatggcagacaataacgaaggcgccgacggagtgggtaatgcctcaggaaattggcattgcgattccacatggctgggcgacagagtcatcaccaccagcacccgcacctgggccttgcccacctacaataaccacctctacaagcaaacctccagtgcttcaacgggggccagcaacgacaaccactacttcggctacagcaccccctgggggtattttgatttcaacagattccactgccacttttcaccacgtgactggcagcgactcatcaacaacaattggggattccggcccaagagactcaacttcaagctcttcaacatccaagtcaaggaggtcacgacgaacgatggcgtcacgaccatcgctaataaccttaccagcacggttcaagtcttctcggattcagagtaccaactgccgtacgtcctcggctctgcgcaccagggctgcctccctccgttcccggcggacgtgttcatgattccgcagtacggctacctaacgctcaacaatggcagccaggccgtgggacgttcatccttttactgcctggaatatttcccttctcagatgctgagaacgggcaacaactttaccttcagctacacctttgaggaagtgcctttccacagcagctacgcgcacagccagagcctggaccggctgatgaatcctctcatcgaccaatacctgtattacctgaacagaactcaaaatcagtccggaagtgcccaaaacaaggacttgctgtttagccgtgggtctccagctggcatgtctgttcagcccaaaaactggctacctggaccctgttatcggcagcagcgcgtttctaaaacaaaaacagactacaacaacagcaattttacctggactggtgcttcaaaatataacctcaatgggcgtgaatccatcatcaaccctggcactgctatggcctcacacaaagacgacgaagacaagttctttcccatgagcggtgtcatgatttttggaaaagagagcgccggagcttcaaatactgcattggacaatgtcatgatcacagatgaagaggaaattaaagccactaaccctgtggccaccgaaagatttgggaccgtggcagtcaatttccagagcagcagcacagaccccgcgaccggagatgtgcatgttatgggagccttacctggcatggtgtggcaagacagagacgtatacctgcagggtcccatttgggccaaaattcctcacacggatggacactttcacccgtctcctctcatgggcggctttggacttaagcacccgcctcctcaaatcctcatcaaaaacacgcctgttcctgcgaatcctccggcagagttttcggctacaaagtttgcttcattcatcacccagtactccacaggacaagtgagtgtggaaattgaatgggagctgcagaaagaaaacagcaagcgctggaatcccgaagtgcagtacacatccaattatgcaaaatctgccaacgttgatttcactgtggacaacaatggactttatactgagcctcgccccattggcacccgttaccttacccgtcccttg

SEQ ID NO: 673 - DNA, 2208 bp, Artificial Sequence
  Description of Artificial Sequence: Synthetic polynucleotide
atggctgccgatggttatcctccagattggctcgaggacaacctctctgagggcattcgcgagtggtgggacttgaaacctggagtcccgaaacctaaagccaaccagcaaaagcaggacgacggccggggtctggtgcttcctggctacaagtacctcggacccttcaacggactcgacaagggggagcccgtcaacgcggcggacgcagcggccctcgagcacgacaaggcctacgaccagcagctcaaagcgggtgacaatccgtacctgcggtataaccacgccgacgccgagtttcaggagcgtctgcaagaagatacgtcttttgggggcaacctcgggcgagcagtcttccaggccaagaagcgggttctcgaaccttttggtctggttgaggaaggcgctaagacggctcctggaaagaaacgtccggtagagcagtcgccacaagagccagactcctcctcgggcatcggcaagacaggccagcagcccgctaaaaagagactcaattttggtcagactggcgactcagagtcagtccccgacccacaacctctcggagaacctccagcaacccccgctgctgtgggacctactacaatggcttcaggcggtggcgcaccaatggcagacaataacgaaggcgccgacggagtgggtaatgcctcaggaaattggcattgcgattccacatggctgggcgacagagtcatcaccaccagcacccgcacctgggccttgcccacctacaataaccacctctacaagcaaatctccagtgcttcaacgggggccagcaacgacaaccactacttcggctacagcaccccctgggggtattttgatttcaacagattccactgccacttttcaccacgtgactggcagcgactcatcaacaacaattggggattccggcccaagagactcaacttcaagctcttcaacatccaagtcaaggaggtcacgacgaacgatggcgtcacgaccatcgctaataaccttaccagcacggttcaagtcttctcggattcagagtaccaactgccgtacgtcctcggctctgcgcaccagggctgcctccctccgttcccggcggacgtgttcatgattccgcagtacggctacctaacgctcaacaatggcagccaggccgtgggacgttcatccttttactgcctggaatatttcccttctcagatgctgagaacgggcaacaactttaccttcagctacacctttgaggaagtgcctttccacagcagctacgcgcacagccagagcctggaccggctgatgaatcctctcatcgaccaatacctgtattacctgaacagaactcaaaatcagtccggaagtgcccaaaacaaggacttgctgtttagccgtgggtctccagctggcatgtctgttcagcccaaaaactggctacctggaccctgttatcggcagcagcgcgtttctaaaacaaaaacagacaacaacaacagcaattttacctggactggtgcttcaaaatataacctcaatgggcgtgaatccatcatcaaccctggcactgctatggcctcacacaaagacgacgaagacaagttctttcccatgagcggtgtcatgatttttggaaaagagagcgccggagcttcaaatactgcattggacaatgtcatgatcacagatgaagaggaaattaaagccactaaccctgtggccaccgaaagatttgggaccgtggcagtcaatttccagagcagcagcacagaccccgcgaccggagatgtgcatgttatgggagccttacctggcatggtgtggcaagacagagacgtatacctgcagggtcccatttgggccaaaattcctcacacggatggacactttcacccgtctcctctcatgggcggctttggacttaagcacccgcctcctcaaatcctcatcaaaaacacgcctgttcctgcgaatcctccggcagagttttcggctacaaagtttgcttcattcatcacccagtactccacaggacaagtgagtgtggaaattgaatgggagctgcagaaagaaaacagcaagcgctggaatcccgaagtgcagtacacatccaattatgcaaaatctgccaacgttgatttcactgtggacaacaatggactttatactgagcctcgccccattggcacccgttaccttacccgtcccttg

SEQ ID NO: 674 - DNA, 2196 bp, Artificial Sequence
  Description of Artificial Sequence: Synthetic polynucleotide
atggctgccgatggttatcttccagattggctcgaggacaacctctctgagggcattcgcgagtggtgggacttgaaacctggagccccgaaacctaaagccaaccagcaaaagcaggacgacggccggggtctggtgcttcctggctacaagtacctcggacccttcaacggactcgacaagggggagcccgtcaacgcggcggacgcagcggccctcgagcacgacaaggcctacgaccagcagctcaaagcgggtgacaatccgtacctgcggtataaccacgccgacgccgagtttcaggagcgtctgcaagaagatacgtcttttgggggcaacctcgggcgagcagtcttccaggccaagaagcgggttctcgaaccttttggtctggttgaggaaggcgctaagacggctcctggaaagaaacgtccggtagagcagtcgccacaagagccagactcctcctcgggcatcggcaagacaggccagcagcccgctaaaaagagactcaattttggtcagactggcgactcagagtcagtccccgacccacaacctctcggagaacctccagcaacccccgctgctgtgggacctactacaatggcttcaggcggtggcgcaccaatggcagacaataacgaaggcgccgacggagtgggtaatgcctcaggaaattggcattgcgattccacatggctgggcgacagagtcatcaccaccagcacccgcacctgggccttgcccacctacaataaccacctctacaagcaaatctccagtgcttcaacgggggccagcaacgacaaccactacttcggctacagcaccccctgggggtattttgatttcaacagattccactgccacttttcaccacgtgactggcagcgactcatcaacaacaattggggattccggcccaagagactcaacttcaagctcttcaacatccaagtcaaggaggtcacgacgaacgatggcgtcacgaccatcgctaataaccttaccagcacggttcaagccttctcggattcagagtaccaactgccgtacgtcctcggctctgcgcaccagggctgcctccctccgttcccggcggacgtgttcatgattccgcagtacggctacctaacgctcaacaatggcagccaggccgtgggacgttcatccttttactgcctggaatatttcccttctcagatgctgagaacgggcaacaactttaccttcagctacacctttgaggaagtgcctttccacagcagctacgcgcacagccagagcctggaccggctgatgaatcctctcatcgacccatacctgtattacctgaacagaactcaaaatcagtccggaagtgcccaaaacaaggacttgctgtttagccgtgggtctccagctggcatgtctgttcagcccaaaaactggctacctggaccctgttatcggcagcagcgcgtttctaaaacaaaaacagacaacaacaacagcaattttacctggactggtgcttcaaaatataacctcaatgggcgtgaatccatcatcaaccctggcactgctatggcctcacacaaagacgacgaagacaagttctttcccatgagcggtgtcatgatttttggaaaagagagcgccggagcttcaaatactgcattggacaatgtcatgatcacagatgaagaggaaattaaagccactaaccctgtggccaccgaaagatttgggaccgtggcagtcaatttccagagcagcagcacagaccccgcgaccggagatgtgcatgttatgggagccttacctggcatggtgtggcaagacagagacgtatacctgcagggtcccatttgggccaaaattcctcacacggatggacactttcacccgtctcctctcatgggcggctttggacttaagcacccgcctcctcaaatcctcatcaaaaacacgcctgttcctgcgaatcctccggcagagttttcggctacaaagtttgcttcattcatcacccagtactccacaggacaagtgagtgtggaaattgaatgggagctgcagaaagaaaacagcaagcgctggaatcccgaagtgcagtacacatccaattatgcaaaatctgccaacgttgatttcactgtggacaacaatggactttatactgagcctcgccccattggcacccgttacctt

SEQ ID NO: 675 - DNA, 2208 bp, Artificial Sequence
  Description of Artificial Sequence: Synthetic polynucleotide
atggctgccgatggttatcttccagattggctcgaggacaacctctctgagggcattcgcgagtggtgggacttgaaacctggagccccgaaacctaaagccaaccagcaaaagcaggacgacggccggggtctggtgcttcctggctacaagtacctcggacccttcaacggactcgacaagggggagcccgtcaacgcggcggacgcagcggccctcgagcacgacaaggcctacgaccagcagctcaaagcgggtgacaatccgtacctgcggtataaccacgccgacgccgagtttcaggagcgtctgcaagaagatacgtcttttgggggcaacctcgggcgagcagtcttccaggccaagaagcgggttctcgaaccttttggtctggttgaggaaggcgctaagacggctcctggaaagaaacgtccggtagagcagtcgccacaagagccagactcctcctcgggcatcggcaagacaggccagcagcccgctaaaaagagactcaattttggtcagactggcgactcagagtcagtccccgacccacaacctctcggagaacctccagcaacccccgctgctgtgggacctactacaatggcttcaggcggtggcgcaccaatggcagacaataacgaaggcgccgacggagtgggtaatgcctcaggaaattggcattgcgattccacatggctgggcgacagagtcatcaccaccagcacccgcacctgggccttgcccacctacaataaccacctctacaagcaaatctccagtgcttcaacgggggccagcaacgacaaccactacttcggctacagcaccccctgggggtattttgatttcaacagattccactgccacttttcaccacgtgactggcagcgactcatcaacaacaattggggattccggcccaagagactcaacttcaagctcttcaacatccaagtcaaggaggtcacgacgaacgatggcgtcacgaccatcgctaataaccttaccagcacggttcaagtcttctcggattcagagtaccaactgccgtacgtcctcggctctgcgcaccagggctgcctccctccgttcccggcggacgtgttcatgattccgcagtacggctacctaacgctcaacaatggcagccaggccgtgggacgttcatccttttactgcctggaatatttcccttctcagatgctgagaacgggcaacaactttaccttcagctacacctttgaggaagtgcctttccacagcagctacgcgcacagccagagcctggaccggctgatgaatcctctcatcgaccaatacctgtattacctgaacagaactcaaaatcagtccggaagtgcccaaaacaaggacttgctgtttagccgtgggtctccagctggcatgtctgttcagcccaaaaactggctacctggaccctgttatcggcagcagcgcgtttctaaaacaaaaacagacaacaacaacagcaattttacctggactggtgcttcaaaatataacctcaatgggcgtgaatccatcatcaaccctggcactgctatggcctcacacaaagacgacgaagacaagttctttcccatgagcggtgtcatgatttttggaaaagagagcgccggagcttcaaatactgcattggacaatgtcatgatcacagatgaagaggaaattaaagccactaaccctgtggccaccgaaagatttgggaccgtggcagtcaatttccagagcagcagcacagaccccgcgaccggagatgtgcatgttatgggagccttacctggcatggtgtggcaagacagagacgtatacctgcagggtcccatttgggccaaaattcctcacacggatggacactctcacccgtctcctctcatgggcggctttggacttaagcacccgcctcctcaaatcctcatcaaaaacacgcctgttcctgcgaatcctccggcagagttttcggctacaaagtttgcttcattcatcacccagtactccacaggacaagtgagtgtggaaattgaatgggagctgcagaaagaaaacagcaagcgctggaatcccgaagtgcagtacacatccaattatgcaaaatctgccaacgttgatttcactgtggacaacaatggactttatactgagcctcgccccattggcacccgttaccttacccgtcccttg

SEQ ID NO: 676 - DNA, 2208 bp, Artificial Sequence
  Description of Artificial Sequence: Synthetic polynucleotide
atggctgccgatggttatcttccagattggctcgaggacaacctctctgagggcattcgcgagtggtgggacttgaaacctggagccccgaaacctaaagccaaccagcaaaagcaggacgacggccggggtctggtgcttcctggctacaagtacctcggacccttcaacggactcgacaagggggagcccgtcaacgcggcggacgcagcggccctcgagcacgacaaggcctacgaccagcagctcaaagcgggtgacaatccgtacctgcggtataaccacgccgacgccgagtttcaggagcgtctgcaagaagatacgtcttttgggggcaacctcgggcgagcagtcttccaggccaagaagcgggttctcgaaccttttggtctggttgaggaaggcgctaagacggctcctggaaagaaacgtccggtagagcagtcgccacaagagccagactcctcctcgggcatcggcaagacaggccagcagcccgctaaaaagagactcaattttggtcagactggcgactcagagtcagtccccgacccacaacctctcggagaacctccagcaacccccgctgctgtgggacctactacaatggcttcaggcggtggcgcaccaatggcagacaataacgaaggcgccgacggagtgggtaatgcctcaggaaattggcattgcgattccacatggctgggcgacagagtcatcaccaccagcacccgcacctgggccttgcccacctacaataaccacctctacaagcaaatctccagtgcttcaacgggggccagcaacgacaaccactacttcggctacagcaccccctgggggtattttgatttcaacagattccactgccacttttcaccacgtgactggcagcgactcatcaacaacaattggggattccggcccaagagactcaacttcaagctcttcaacatccaagtcaaggaggtcacgacgaacgatggcgtcacgaccatcgctaataaccttaccagcacggttcaagtcttctcggattcagagtaccaactgccgtacgtcctcggctctgcgcaccagggctgcctccctccgttcccggcggacgtgttcatgattccgcagtacggctacctaacgctcaacaatggcagccaggccgtgggacgttcatccttttactgcctggaatatttcccttctcagatgctgagaacgggcaacaactttaccttcagctacacctttgaggaagtgcctttccacagcagctacgcgcacagccagagcctggaccggctgatgaatcctctcatcgacctatacctgtattacctgaacagaactcaaaatcagtccggaagtgcccaaaacaaggacttgctgtttagccgtgggtctccagctggcatgtctgttcagcccaaaaactggctacctggaccctgttatcggcagcagcgcgtttctaaaacaaaaacagacaacaacaacagcaattttacctggactggtgcttcaaaatataacctcaatgggcgtgaatccatcatcaaccctggcactgctatggcctcacacaaagacgacgaagacaagttctttcccatgagcggtgtcatgatttttggaaaagagagcgccggaacttcaaatactgcattggacaatgtcatgatcacagatgaagaggaaattaaagccactaaccctgtggccaccgaaagatttgggaccgtggcagtcaatttccagagcagcagcacagaccccgcgaccggagatgtgcatgttatgggagccttacctggcatggtgtggcaagacagagacgtatacctgcagggtcccatttgggccaaaattcctcacacggatggacactttcacccgtctcctctcatgggcggctttggacttaagcacccgcctcctcaaatcctcatcaaaaacacgcctgttcctgcgaatcctccggcagagttttcggctacaaagtttgcttcattcatcacccagtactccacaggacaagtgagtgtggaaattgaatgggagctgcagaaagaaaacagcaagcgctggaatcccgaagtgcagtacacatccaattatgcaaaatctgccaacgttgatttcactgtggacaacaatggactttatactgagcctcgccccattggcacccgttaccttacccgtcccttg

SEQ ID NO: 677 - DNA, 2208 bp, Artificial Sequence
  Description of Artificial Sequence: Synthetic polynucleotide
atggctgccgatggttatcttccagattggctcgaggacagcctctctgagggcattcgcgagtggtgggacttgaaacctggagccccgaaacctaaagccaaccagcaaaagcaggacgacggccggggtctggtgcttcctggctacaagtacctcggacccttcaacggactcgacaagggggagcccgtcaacgcggcggacgcagcggccctcgagcacgacaaggcctacgaccagcagctcaaagcgggtgacaatccgtacctgcggtataaccacgccgacgccgagtttcaggagcgtctgcaagaagatacgtcttttgggggcaacctcgggcgagcagtcttccaggccaagaagcgggttctcgaaccttttggtctggttgaggaaggcgctaagacggctcctggaaagaaacgtccggtagagcagtcgccacaagagccagactcctcctcgggcatcggcaagacaggccagcagcccgctaaaaagagactcaattttggtcagactggcgactcagagtcagtccccgacccacaacctctcggagaacctccagcaacccccgctgctgtgggacctactacgatggcttcaggcggtggcgcaccaatggcagacaataacgaaggcgccgacggagtgggtaatgcctcaggaaattggcattgcgattccacatggctgggcgacagagtcatcaccaccagcacccgcacctgggccttgcccacctacaataaccacctctacaagcaaatctccagtgcttcaacgggggccagcaacgacaaccactacttcggctacagcaccccctgggggtattttgatttcaacagattccactgccacttttcaccacgtgactggcagcgactcatcaacaacaattggggattccggcccaagagactcaacttcaagctcttcaacatccaagtcaaggaggtcacgacgaacgatggcgtcacgaccatcgctaataaccttaccagcacggttcaagtcttctcggattcagagtaccaactgccgtacgtcctcggctctgcgcaccagggctgcctccctccgttcccggcggacgtgttcatgattccgcagtacggctacctaacgcccaacaatggcagccaggccgtgggacgttcatccttttactgcctggaatatttcccttctcagatgctgagaacgggcaacaactttaccttcagctacacctttgaggaagtgcctttccacagcagctacgcgcacagccagagcctggaccggctgatgaatcctctcatcgaccaataccagtattacctgaacagaactcaaaatcagtccggaagtgcccaaaacaaggacttgctgtttagccgtgggtctccagctggcatgtctgttcagcccaaaaactggctacctggaccctgttatcggcagcagcgcgtttctaaaacaaaaacagacaacaacaacagcaattttacctggactggtgcttcaaaatataacctcaatgggcgtgaatccatcatcaaccctggcactgctatggcctcacacaaagacgacgaagacaagttctttcccatgagcggtgtcatgatttttggaaaagagagcgccggagcttcaaatactgcattggacaatgtcatgatcacagatgaagaggaaattaaagccactaaccctgtggccaccgaaagatttgggaccgtggcagtcaatttccagagcagcagcacagaccccgcgaccggagatgtgcatgttatgggagccttacctggcatggtgtggcaagacagagacgtatacctgcagggtcccatttgggccaaaattcctcacacggatggacactttcacccgtctcctctcatgggcggctttggacttaagcacccgcctcctcaaatcctcatcaaaaacacgcctgttcctgcgaatcctccggcagagttttcggctacaaagtttgcttcattcatcacccagtactccacaggacaagtgagtgtggaaattgaatgggagctgcagaaagaaaacagcaagcgctggaatcccgaagtgcagtacacatccaattatgcaaaatctgccaacgttgatttcactgtggacaacaatggactttatactgagcctcgccccattggcacccgttaccttacccgtcccttg

SEQ ID NO: 678 - DNA, 2208 bp, Artificial Sequence; identical to SEQ ID NO: 669
  Description of Artificial Sequence: Synthetic polynucleotide

SEQ ID NO: 679 - DNA, 2205 bp, Artificial Sequence
  Description of Artificial Sequence: Synthetic polynucleotide
atggctgccgatggttatcttccagattggctcgaggacactctctctgaaggaataagacagtggtggaagctcaaacctggcccaccaccaccaaagcccgcagagcggcataaggacgacagcaggggtcttgtgcttcctgggtacaagtacctcggacccttcaacggactcgacaagggagagccggtcaacgaggcagacgccgcggccctcgagcacgacaaagcctacgaccggcagctcgacagcggagacaacccgtacctcaagtacaaccacgccgacgcggagtttcaggagcgccttaaagaagatacgtcttttgggggcaacctcggacgagcagtcttccaggcgaaaaagagggttcttgaacctctgggcctggttgaggaacctgttaagacggctccgggaaaaaagaggccggtagagcactctcctgtggagccagactcctcctcgggaaccggaaaggcgggccagcagcctgcaagaaaaagattgaattttggtcagactggagacgcagactcagtacctgacccccagcctctcggacagccaccagcagccccctctggtctgggaactaatacgatggctacaggcagtggcgcaccaatggcagacaataacgagggcgccgacggagtgggtaattcctcgggaaattggcattgcgattccacatggatgggcgacagagtcatcaccaccagcacccgaacctgggccctgcccacctacaacaaccacctctacaaacaaatttccagccaatcaggagcctcgaacgacaatcactactttggctacagcaccccttgggggtattttgacttcaacagattccactgccacttttcaccacgtgactggcaaagactcatcaacaacaactggggattccgacccaagagactcaacttcaagctctttaacattcaagtcaaagaggtcacgcagaatgacggtacgacgacgattgccaataaccttaccagcacggttcaggtgtttactgactcggagtaccagctcccgtacgtcctcggctcggcgcatcaaggatgcctcccgccgttcccagcagacgtcttcatggtgccacagtatggatacctcaccctgaacaacgggagtcaggcagtaggacgctcttcattttactgcctggagtactttccttctcagatgctgcgtaccggaaacaactttaccttcagctacacttttgaggacgttcctttccacagcagctacgctcacagccagagtctggaccgtctcatgaatcctctcatcgaccagtacctgtattacttgagcagaacaaacactccaagtggaaccaccacgcagtcaaggcttcagttttctcgggccggagcgagtgacattcgggaccagtctaggaactggcttcctggaccctgttaccgccagcagcgagtatcaaagacatctgcggataacaacaacagtgaatactcgtggactggagctaccaagtaccacctcaatggcagagactctctggtgaatccgggcccggccatggcaagccacaaggacgatgaagaaaagttttttcctcagagcggggttctcatctttgggaagcaaggctcagagaaaacaaatgtggacattgaaaaggtcatgattacagacgaagaggaaatcaggacaaccaatcccgtggctacggagcagtatggttctgtatctaccaacctccagagaggcaacagacaagcagctaccgcagatgtcaacacacaaggcgttcttccaggcatggtctggcaggacagagatgtgtaccttcaggggcccatctgggcaaagattccacacacggacggacattttcacccctctcccctcatgggtggattcggacttaaacaccctcctccacagattctcatcaagaacaccccggtacctgcgaatccttcgaccaccttcagtgcggcaaagtttgcttccttcatcacacagtactccacgggacaggtcagcgtggagatcgagtgggagctgcagaaggaaaacagcaaacgctggaatcccgaaattcagtacacttccaactacaacaagtctgttaatgtggactttactgtggacactaatggcgtgtattcagagcctcgccccattggcaccagatacctgactcgtaatctg

SEQ ID NO: 680 - protein, 736 aa, Artificial Sequence
  Description of Artificial Sequence: Synthetic polypeptide
MAADGYLPDWLEDNLSEGIREWWALKPGAPQPKANQQHQDNARGLVLPDYKYLGPGNGLDKGEPVNAADVAALEHDKAYDQQLKAGDNPYLKYNHADAEFQERLKEDTSFGGNLGRAVFQAKKRLLEPLGLVEEAAKTAPGKKRPVEQSPQEPDSSAGIGKSGAQPAKKRLNFGQTGDTESVPDPQPIGEPPAAPSGVGSLTMASGGGAPVADNNEGADGVGSSSGNWHCDSQWLGDGVITTSTRTWALPTYNNHLYKQISNSTSGGSSNDNAYFGYSTPWGYFDFNRFHCHFSPRDWQRLINNNWGFRPKRLNFKLFNIQVKEVTDNNGVKTIANNLTSTVQVFTDSDYQLPYVLGSAHEGCLPPFPADVFMIPQYGYLTLNDGSQAVGRSSFYCLEYFPSQMLRTGNNFQFSYEFENVPFHSSYAHSQSLDRLMNPLIDQYLHYLPKTINGSGQNQQTLKFSVAGPSNMAVQGRNYIPGPSYRQQRVSTTVTQNNNSEFAWPGASSWALNGRNSLMNPGPAMASYKEGEDSFFPLSGSLIFGKQGTGRDNVDADKVMITNEEEIKTTNPVATESYGQVATNHQSAQAQAQTGWVQNQGILPGMVWQDRDVYLQGPIWAKIPHTDGNFHPSPLMGGFGMKHPPPQTLIKNTPVPADPPTAFNKDKLNSFITQYSTGQVSVEIEWELQKENSKRWNPEIQYTSNYYKSNNVEFAVNTEGVYSEPRPIGTRYLTRNL

SEQ ID NO: 681 - protein, 736 aa, Artificial Sequence
  Description of Artificial Sequence: Synthetic polypeptide
MAADGYLPDWLEDNLSEGIREWWALKPGAPQPKANQQHQDNARGLVLPGYKYLGPGNGLDKGEPVNAADAAALEHDKAYDQQLKAGDNPYLKYNHADAEFQERLKEDTSFGGNLGRAVFQAKRRLLEPLGLVEEAAKTAPGKKRPVEQSPQEPDSSAGIGKSGAQPAKKRLNFGQTGDTESVPDPQPIGEPPAAPSGVGSLTMASGGGAPVADNNEGADGVGSSSGNWHCDSQWLGDRVITTSTRTWALPTYNNHLYKQISNSTSGGSSNDNAYFGYSTPWGYFDFNRFHCHFSPRDWQRLINNNWGFRPKRLNFKLFNIQIKEVTDNNGVKTIANNLTSTVQVFTDLDYQLPYVLGSAHEGCLPPFPADVFMIPQYGYLTLNDGSQAVGRSSFYCLEYFPSQMLRTGNNFQFSYEFENVPFHSSYAHSQSLDRLMNPLIDQYLHYLSKTINGSGQNQQTLKFSVAGPSNMAVQGRNYIPGPSYRQQRVSTTVTQNNNSEFAWPGASSWALNGRNSLMNPGPAMASYKEGEDSFFPLSGSLIFGKQGTGRDNVDADKVMITNEEEIKTTNPVATESYGQVATNHQSAQAQAQTGWVQNQGILPGMVWQDRDVYLQGPIWAKIPHTDGNFHPSPLMGGFGMKHPPPQTLIKNTPVPADPPTAFNKDKLNSFITQYSTGQVSVEIEWELQKENSKRWNPEIQYTSNYYKSNNVEFAVNTEGVYSEPRPIGTRYLTRNL

SEQ ID NO: 682 - protein, 736 aa, Artificial Sequence
  Description of Artificial Sequence: Synthetic polypeptide
MAADGYLPDWLEDNLSEGIREWWALKPGAPQPKANQQHQDNARGLVLPGYKYLGPGNGLDKGEPVSAADAAALEHDKAYDQQLKAGDNPYLKYNHADAEFQERLKEDTSFGGNLGRAVFQAKKRLLEPLGLVEEAAKTAPGKKRPVEQSPQEPDSSAGIGKSGAQPAKKRLNFGQTGDTESVSDPQPIGEPPAAPSGVGSLTMASGGGAPVADNNEGADGVGSSSGNWHCDSQWLGDRVITTSTRTWALPTYNNHLYKQISNSTSGGSSNDNAYFGYSTPWGYFDFNRFHCHFSPRDWQRLINNNWGFRPKRLNFKLFNIQVKEVTDNNGVKTIANNLTSTVQVFTDSDYQLPYVLGSAHEGCLPPSPADVFMIPQYGYLTLNDGSQAVGRSSFYCLEYFPSQMLRTGNNFQFSYEFENVPFHSSYAHSQSLDRLMNPLIDQYLHYLSKTINGSGQNQQTLKFSVAGPSNMAVQGRNYIPGPSYRQQRVSTTVTQNNNSEFAWPGASSWALNGRNSLMNPGPAMASYKEGEDSFFPLSGSLIFGKQGTGRDDVDADKVIITNEEEIKTTNPVATESYGQVATNHQSAQAQAQTGWVQNQGILPGMVWQDRDVYLQGPIWAKIPHTDGNFHPSPLMGGFGMKHPPPQTLIKNTPVPADPPTAFNKDKLNSFITQYSTGQVSVEIEWELQKENSKRWNPEIQYTSNYYKSNNVEFAVNTEGVYSEPRPIGTRYLTRNL

SEQ ID NO: 683 - protein, 736 aa, Artificial Sequence
  Description of Artificial Sequence: Synthetic polypeptide
MAADGYLPDWLEDNLSEGIREWWALKPGAPQPKANQQHQDNARGLVLPGYKYLGPGNGLDKGEPVNAADAAALEHDKAYDQQLKAGDNPYLKYNHAGAEFQERLKEDTSFGGNLGRAVFQAKKRLLEPLGLVEEAAKTAPGKKRPVEQSPQEPDSSAGIGKSGAQPAKKRLNFGQTGDTESVPDPQPIGEPPAAPSGVGSLTMASGGGAPVADNNEGAGGVGSSSGNWHCDSQWLGDRVVTTSTRTWALPTYNNHLYKQISNSTSGGSSNDNAYFGYSTPWGYFDFNRFHCHFSPRDWQRLINNNWGFRPKRLNFKLFNIQVKEVTDNNGVKTIANNLTSTVQVFTDSDYQLPYVLGSAHGGCLPPFPADVFMIPQYGYLTLNDGSQAVGRSSFYCLEYFPSQMLRTGNNFQFSYEFENVPFHSSYAHSQSLDRLMNPLIDQYLHYLSKTINGSGQNQQTLKFSVAGPSNMAVQGRSYIPGPSYRQQRVSTTVTQNNNSEFAWPGASSWALNGRNSLMNPGPAMASYKEGEDSFFPLSGSLIFGKQGTGRDNVDADKVMITNEEEIKTTNPVATESYGQVATNHQSAQAQAQTGWVQNQGILPGMVWQDRDVYLQGPIWAKIPHTDGNFHPSPLMGGFGMKHPPPQTLIKNTPVPADPPTAFNKDKLNSFITQYSTGQVSVEIEWELQKENSKRWNPEIQYTSNYYKSNNVEFAVNTEGVYSEPRPIGTRYLTRNL

SEQ ID NO: 684 - protein, 736 aa, Artificial Sequence
  Description of Artificial Sequence: Synthetic polypeptide
MAADGYLPDWLEDNLSEGIREWWALKPGAPQPKANQQHQDNARGLVLPGYKYLGPGNGLDKGEPVNAADAAALEHDKAYDQQLKAGDNPYLKYNHADAEFQERLKEDTSFGGNLGRAVFQAKKRLLEPLGLVEEAAKTAPGKKRPVEQSPQEPDSSAGIGKSGAQPAKKRLNFGQTGDTESVPDPQPIGEPPAAPSGVGSLTMASGGGAPVADNNEGADGVGSSSGNWHCDSQWLGDRVVTTSTRTWALPTYNNHLYKQISNSTSGGSSNDNAYFGYSTPWGYFDFNRFHCHFSPRDWQRLINNNWGFRPKRLNFKLFNIQVKEVTDNNGVKTIANNLTSTVQVFTDSDYQLPYVLGSAHEGCLPPFPADVFMIPQYGYLTLNDGSQAVGRSSFYCLEYFPSQMLRTGNNFQFSYEFENVPFHSSHAHSQSLDRLMNPLIDQYLHYLSKTINGSGQNQQTLKFSVAGHSNMAVQGRNYIPGPSYRQQRVSTTVTQNNNSEFAWPGASSWALNGRNSLMNPGPAMASYKEGEDSFFPLSGSLIFGKQGTGRDNVDADKVMITNEEEIKTTNPVATESYGQVATNHQSAQAQAQTGWVQNQGILPGMVWQDRDVYLQGPIWAKIPHTDGNFHPSPLMGGFGMKHPPPQTLIKNTPVPADPPTAFNKDKLNSFITQYSTGQVSVEIGWELQKENSKRWNPEIQYTSNYYKSNNVEFAVNTEGVYSEPRPIGTRYLTRNL

SEQ ID NO: 685 - protein, 736 aa, Artificial Sequence
  Description of Artificial Sequence: Synthetic polypeptide
MAADGYLPDWLEDNLSEGIREWWALKPGAPQPKANQQHQDNARGLVLPGYKYLGPGNGLDKGEPVNAADAAALEHDKAYDQQLKAGDNPYLKYNHADAEFQERLKEDTSFGGNLGRAVFQAKKRLLEPLGLVEEAAKTAPGKKRPVEQSPQEPDSSAGIGKSGAQPAKKRLNFGQTGDTESVPDPQPIGEPPAAPSGVGSLTMASGGGAPVADNNEGADGVGSSSGNWHCDSQWLGDRVITTSTRTWALPTYNNRLYKQISNSTSGGSSNDNAYFGYSTPWGYFDFNRFHCHFSPRDWQRLINNNWGFRPKRLNFKPFNIQVKEVTDNNGVKTIANNLTSTVQVFTDSDYQLPYVLGSAHEGCLPPFPADVFMIPQYGYLTLNDGSQAVGRSSFYCLEYFPSQMLRTGNNFQFSYEFENVPFHSSYAHSQSLDRLMNPLIDQYLHYLSKTINGSGQNQQTLKFSVAGPSNMAVQGRNYIPGPSYRQQRVSTTVTQNNNSEFAWPGASSWALNGRNSLMNPGPAMASYKEGEDSFFPLSGSLIFGKQGTGRDNVDADKVMITNEEEIKTTNPVATESYGQVATNHQSAQAQAQTGWVQNQGILPGMVWQDRDVYLQGPIWAKIPHTDGNFHPSPLMGGFGMKHPPPQTLIKNTPVPADPPTAFNKDKLNSFITQYSTGQVSVEIEWELQKENSKRWNPEIQYTSNYYKSNNVEFAVNTEGVYSEPRPIGTRYLTRNL

SEQ ID NO: 686 - protein, 736 aa, Artificial Sequence
  Description of Artificial Sequence: Synthetic polypeptide
MAADGYLPDWLEDNLSEGIREWWALKPGAPQPKANQQHQDNARGLVLPGYKYLGPGNGLDKGEPVNAADAAALEHDKAYDQQLKAGDNPYLKYNHADAEFQERLKEDTSFGGNLGRAVFQAKKRLLEPLGLVEEAAKTAPGKKRPVEQSPQEPDSSAGIGKSGAQPAKKRLNFGQTGDTESVPDPQPIGEPPAAPSGVGSLTMASGGGAPVADNNEGADGVGSSSGNWHCDSQWLGDRVITTSTRTWALPTYNNHLYKQISNSTSGGSSNDNAYFGYSTPWGYFDFNRFHCHFSPRDWQRLINNNWGFRPKRLNFKLFNIQVKEVTDNNGVKTIANNLTSTVQVFTDSDYQLPYVLGSAHEGCLPPFPADVFMIPQYGYLTLNDGSQAVGRSSFYCLEYFPSQMLRTGNNFQFSYEFENVPFHSSYAHSQSLDRLMNPLIDQYLHYLSKTINGSGQNQQTLKFSVAGPSNMAVQGRNYIPGPSYRQQRVSTTVTQNNNSEFAWPGASSWALNGRNSLMNPGPAMASYKEGEDSFFPLSGSLIFGKQGTGRDNVDADKVMITNEEEIKTTNPVATESYGQVATNHQSAQAQAQTGWVQNQGILPGMVWQDRDVYLQGPIWAKIPHTDGNFHPSPLMGGFGMKHPPPQTLIKNTPVPADPPTAFNKDKLNSFITQYSTGQVSVEIEWELQKENSKRWNPEIQYTSNYYKSNNVEFAVNTEGVYSEPRPIGTRYLTRNL

SEQ ID NO: 687 - protein, 736 aa, Artificial Sequence; identical to SEQ ID NO: 686
  Description of Artificial Sequence: Synthetic polypeptide

SEQ ID NO: 688 - protein, 736 aa, Artificial Sequence
  Description of Artificial Sequence: Synthetic polypeptide
MAADGYLPDWLEDNLSEGIREWWDLKPGAPKPKANQQKQDDGRGLVLPGYKYLGPFNGLDKGEPVNAADAAALEHDKAYDQQLKAGDNPYLRYNHADAEFQERLQEDTSFGGNLGRAVFQAKKRVLEPFGLVEEGAKTAPGKKRPVEQSPQEPDSSSGIGKSGQQPAKKRLNFGQTGDSESVPDPQPLGEPPATPAALGPTTMASGGGAPMADNNEGADGVGNASGNWHCDSTWLGDRVITTSTRTWALPTYNNHLYKQISSASTGASNDNHYFGYSTPWGYFDFNRFHCHFSPRDWQRLINNNWGFRPKRLNFKLFNIQVKEVTTNDGVTTIANNLTSTVQVFSDSEYQLPYVLGSAHQGCLPPFPADVFMIPQYGYLTLNNGSKAVGRSSFYCLEYFPSQMLRTGNNFTFSYTFEEVPFHSSYAHSQSLDRLMNPLIDQYLYYLNRTQNQSGSAQNKDLLFSRGSPAGMSVQPKNWLPGPCYRQQRVSKTKTDNNNSNFTWTGASKYNLNGRESIINPGTAMASHKDDEDKFFPMSGVMIFGKESAGASNTALDNVMITDEEEIKATNPVATERFGTVAVNFQSSSTDPATGDVHVMGALPGMVWQDRDVYLQGPIWAKIPHTDGHFHPSPLMGGFGLKHPPPQILIKNTPVPANPPAEFSATKFASFITQYSTGQVSVEIEWELQKENSKRWNPEVQYTSNYAKSANVDFTVDNNGLYTEPRPIGTRYLTRPL

SEQ ID NO: 689 - protein, 736 aa, Artificial Sequence
  Description of Artificial Sequence: Synthetic polypeptide
MAADGYLPDWLEDNLSEGIREWWDLKPGAPKPKANQQKQDDGRGLVLPGYKYLGPFNGLDKGEPVNAADAAALEHDKAYDQQLKAGDNPYLRYNHADAEFQERLQEDTSFGGNLGRAVFQAKKRVLEPLGLVEEGAKTAPGKKRPVEQSPQEPDSSSGIGKTGQQPAKKRLNFGQTGDSESVPDPQPLGEPPATPAAVGPTTMASGGGAPMADNNEGADGVGNASGNWHCDSTWLGDRVITTSTRTWALPTYNNHLYKQISSTSTGASNDNHYFGYSTPWGYFDFNRFHCHFSPRDWQRLINNNWGFRPKRLNFKLFNIQVKEVTTNDGVTTIANNLTSTVQVFSDSEYQLPYVLGSAHQGCLPPFPADVFMIPQYGYLTLNNGSQAVGRSSFYCLEYFPSQMLRTGNNFTFSYTFEEVPFHSSYAHSQSLDRLMNPLIDQYLYYLNRTQNQSGSAQNKDLLFSRGSPAGMSVQPKNWLPGPCYRQQRVSKTKTDNNNSNFTWTGASKYNLNGRESIINPGTAVASHKDDEDKFFPMSGVMIFGKESAGASNTALDNVMITDEEEIKATNPVATERFGTVAVNFQSSSTDPATGDVHAMGALPGMVWQDRDVYLQGPIWAKIPHTDGHFHPSPLMGGFGLKNPPPQILIKNTPVPANPPAEFSATKFASFITQYSTGQVSVEIEWELQKENSKRWNPEVQYTSNYAKSANVDFTVDNNGLYTEPRPIGTRYLTRPL

SEQ ID NO: 690 - protein, 736 aa, Artificial Sequence
  Description of Artificial Sequence: Synthetic polypeptide
MAADGYLPDWLEDNLSEGIREWWALKPGAPQPKANQQHQDNARGLVLPGYKYLGPGNGLDKGEPVNAADAAALEHDKAYDQQLKAGDNPYLKYNHADAEFQERLKEDTSFGGNLGRAVFQAKKRLLEPLGLVEEAAKTAPGKKRPVEQSPQEPDSSAGIGKSGAQPAKKRLNFGQTGDTESVPDPQPIGEPPAAPSGVGSLTMASGGGAPVADNNEGADGVGSSSGNWHCDSQWLGDRVITTSTRTWALPTYNNHLYKQISNSTSGGSSNDNAYFGYSTPWGYFDFNRFHCHFSPRDWQRLINNNWGFRPKRLNFKLFNIQVKEVTDNNGVKTIANNLTSTVQVFTDSDYQLPYVLGSAHEGCLPPFPADVFMIPQYGYLTLNDGSQAVGRSSFYCLEYFPSQMLRTGNNFQFGYEFENVPFHSSYAHSQSLDRLMNPLIDQYLYYLSKTINGSGQNQQTLKFSVAGPSNMAVQGRNYIPGPSYRQQRVSTTVTQNNNSEFAWPGASSWALNGRNSLMNPGPAMASHKEGEDRFFPLSGSLIFGKQGTGRDNVDADKVMITNEEEIKTTNPVATESYGQVATNHQSAQAQAQTGWVQNQGILPGMVWQDRDVYLQGPIWAKIPHTDGNFHPSPLMGGFGMKHPPPQILIKNTPVPADPPTAFNKDKLNSFITQYSTGQVSVEIEWELQKENSKRWDPEIQYTSNYYKSNNVEFAVNTEGVYSEPRPIGTRYLTRNL

SEQ ID NO: 691 - protein, 736 aa, Artificial Sequence
  Description of Artificial Sequence: Synthetic polypeptide
MAADGYLPDWLEDNLSEGIREWWALKPGAPQPKANQQHQDNARGLVLPGYKYLGPGNGLDKGEPVNAADAAALEHDKAYDQQLKAGDNPYLKYNHADAEFQERLKEDTSFGGNLGRAVFQAKKRLLEPLGLVEEAAKTAPGKKRPVEQSPQEPDSSAGIGKSGAQPAKKRLNFGQTGDTESVPDPQPIGEPPAAPSGVGSLTMASGGGAPVADNNEGADGVGSSSGNWHCDSQWLGDRVITTSTRTWALPTYNNHLYKQISNSTSGGSSNDNAYFGYSTPWGYFDFNRFHCRFSPRDWQRLINNNWGFRPKRLNFKLFNIQVKEVTDNNGVKTIANNLTSTVQVFTDSDYQLPYVLGSAHEGCLPPFPADVFMIPQYGYLTLNDGSQAVGRSSFYCLEYFPSQMLRTGNNFQFSYEFENVPFHSSYAHSQSLDRLMNPLIDQYLYYLSKTINGSGQNQQTLKFSVAGPSNMAVQGRNYIPGPSYRQQRVSTTVTQNNNSEFAWPGASSWALNGRNSLMNPGPAMASHKEGEDRFFPLSGSLIFGKQGTGRDNVDADKVMITNEEEIKTTNPVATESYGQVATNHQSAQAQAQTGWVQNQGILPGMVWQDRDVYLQGPIWAKIPHTDGNFHPSPLMGGFGMKHPPPQILIKNAPVPADPPTAFNKDKLNSFITQYSTGQVSVEIEWELQKENSKRWNPEIQYTSNYYKSNNVEFAVNTEGVYSEPRPIGTRYLTRNL

SEQ ID NO: 692 - protein, 736 aa, Artificial Sequence
  Description of Artificial Sequence: Synthetic polypeptide
MAADGYLPDWLEDNLSEGIREWWALKPGAPQPKANQQHQDNARGLVLPGYKYLGPGNGLDKGEPVSAADAAALEHDKAYDQQLKAGDNPYLKYNHADAEFQERLKEDTSFGGNLGRAVFQAKKRLLEPLGLVEEAAKTAPGKKRPVEQSPQEPDSSAGIGKSGAQPAKKRLNFGQTGDTESVPDPQPIGEPPAAPSGVGSLTMASGGGAPVADNNEGADGVGSSSGNWHCDSQWLGDRVITTSTRTWALPTYNNHLYKQISNSTSGGSSNDNAYFGYSTPWGYFDFNRFHCHFSPRDWQRLINNNWGFRPKRLNFKLFNIQVKEVTDNNGVKTIANNLTSTVQVFTDSDYQLPYVLGSAHEGCLPPFPADVFMIPQYGYLTLNDGSQAVGRSSFYCLEYFPSQMLRTGNNFQFSYEFENVPFHSSYAHSQSLDRLMNPLIDQYLYYLSKTINGSGQNQQTLKFSVAGPSNMAVQGRNYIPGPSYRQQRVSTTVTQNNNSEFAWPGASSWALNGRNSLMNPGPAMASHKEGEDRFFPLSGSLIFGKQGTGRDNVDADKVMITNEEEIKTTNPVATESYGQVATNHQSAQAQAQTGWVQNQGILPGMVWQDRDVYLQGPIWAKIPHTDGNFHPSPLMGGFGMKHPPPQILIKNTPVPADPPTAFNKDKLNSFITQYSTGQVSVEIEWELQKENSKRWNPEIQYTSNYYKSNNVEFAVNTEGVYSEPRPIGTRYLTRNL

SEQ ID NO: 693 - protein, 736 aa, Artificial Sequence
  Description of Artificial Sequence: Synthetic polypeptide
MAADGYLPDWLEDNLSEGIREWWALKPGAPQPKANQQHQDNARGLVLPGYKYLGPGNGLDKGEPVNAADAAALEHDKAYDQQLKAGDNPYLKYNHADAEFQERLKEDTSFGGNLGRAVFQAKKRLLEPLGLVEEAAKTAPGKKRPVEQSPQEPDSSAGIGKSGAQPAKKRLNFGQTGDTESVPDPQPIGEPPAAPSGVGSLTMASGGGAPVADNNEGADGVGSSSGNWHCDSQWLGDRVITTSTRTWALPTYNNHLYKQISNSTSGGSSNDNAYFGYSTPWGYFDFNRFHCHFSPRDWQRLINNNWGFRPKRLNFKLFNIQVKEVTDNNGVKTIANNLTSTVQVFTDSDYQLPYVLGSAHEGCLPPFPADVFMIPQYGYLTLNDGSQAVGRSSFYCLEYFPSQMLRTGNNFQFSYEFENVPFHSSYAHSQSLDRLMNPLIDQYLYYLSKTINGSGQNQQTLKFSVAGPSNTAVQGRNYIPGPSYRQQRVSTTVTQNNNSEFAWPGASSWALNGRNSLMNPGPAMASHKEGEDRFFPLSGSLIFGKQGTGRDNVDADKVMITNEEEIKTTNPVATESYGQVATNHQSAQAQAQTGWVQNQGILPGMVWQDRDVYLQGPIWAKIPHTDGNFHPSPLMGGFGMKHPPPQILIKNTPVPADPPTAFNKDKLNSFITQYSTGQVSVEIEWELQKENSKRWNPEIQYTSNYYKSNNVEFAVNTEGVYSEPRPIGTRYLTRNL

SEQ ID NO: 694 - protein, 736 aa, Artificial Sequence
  Description of Artificial Sequence: Synthetic polypeptide
MAADGYLPDWLEDNLSEGIREWWALKPGAPQPKANQQHQDNARGLVLPGYKYLGPGNGLDKGEPVNAADAAALEHDKAYDQQLKAGDNPYLKYNHADAEFQERLKEDTSFGGNLGRAVFQAKKRLLEPLGLVEEAAKTAPGKKRPVEQSPQEPDSSAGIGKSGAQPAKKRLNFGQTGDTESVPDPQPIGEPPAAPSGVGSLTMASGGGAPVADNNEGADGVGSSSGNWHCDSQWLGDRVITTSTRTWALPTYNNHLYKQISNSTSGGSSNDNAYFGYSTPWGYFDFNRFHCHFSPRDWQRLINNNWGFRPKRLNFKLFNIQVKEVTDNNGVKTIANNLTSTVQVFTDSDYQLPYVLGSAHEGCLPPFPADVFMIPQYGYLTLNDGSQAVGRSSFYCLEYFPSQMLRTGSNFQFSYEFENVPFHSSYAHSQSLDRLMNPLIDQYLYYLSKTINGSGQNQQTLKFSVAGPSNMAVQGRNYIPGPSYRQQRVSTTVTQNNNSEFAWPGASSWALNGRNSLMNPGPAMASHKEGEDRFFPLSGSLIFGKQGTGRDNVDADKVMITNEEEIKTTNPAATESYGQVATNHQSAQAQAQTGWVQNQGILPGMVWQDRDVYLQGPIWAKIPHTDGNFHPSPLMGGFGMKHPPPQILIKNTPVPADPPTAFNKDKLNSFITQYSTGQVSVEIEWELQKENSKRWNPEIQHTSNYYKSNNVEFAVNTEGVYSEPRPIGTRYLTRNL

SEQ ID NO: 695 - protein, 736 aa, Artificial Sequence
  Description of Artificial Sequence: Synthetic polypeptide
MAADGYLPDWLEDNLSEGIREWWALKPGAPQPKANQQHQDNARGLVLPGYKYLGPGNGLDKGEPVNAADAAALEHDKAYDQQLKAGDNPYLKYNHADAEFQERLKEDTSFGGNLGRAVFQAKKRLLEPLGLVEEAAKTAPGKKRPVEQSPQEPDSSAGIGKSGAQPAKKRLNFGQTGDTESVPDPQPIGEPPAAPSGVGSLTMASGGGAPVADNNEGADGVGSSSGNWHCDSQWLGDRVITTSTRTWALPTYNNHLYKQISNSTSGGSSNDNAYFGYSTPWGYFDFNRFHCHFSPRDWQRLINNNWGFRPKRLNFRLFNIQVKEVTDNNGVKTIANNLTSTVQVFTDSDYQLPYVLGSAHEGCLPPFPADVFMIPQYGYLTLNDGSQAVGRSSFYCLEYFPSQMLRTGNNFQFSYEFENVPFHSSYAHSQSLDRLMNPLIDQYLYYLSKTINGSGQNQQTLKFSVAGPSNMAVQGRNYIPGPSYRQQRVSTTVTQNNNSEFAWPGASSWALNGRNSLMNPGPAMASHKEGEDRFFPLSGSLIFGKQGTGRDNVDADKVMITNEEEIKTTNPVATESYGQVATNHQSAQAQAQTGWVQSQGILPGMVWQDRDVYLQGPIWAKIPHTDGNFHPSPLMGGFGMKHPPPQILIKNTPVPADPPTAFNKDKLNSFITQYSTGQVSVEIEWELQKENSKRWNPEIQYTSNYYKSNNVEFAVNTEGVYSEPRPIGTRYLTRNL

SEQ ID NO: 696 - protein, 735 aa, Artificial Sequence
  Description of Artificial Sequence: Synthetic polypeptide
MAADGYLPDWLEDNLSEGIREWWALKPGAPQPKANQQHQDNARGLVLPGYKYLGPGNGLDKGEPVNAADAAALEHDKAYDQQLKAGDNPYLKYNHADAEFQERLKEDTSFGGNLGRAVFQAKKRLLEPLGLVEEAAKTAPGKKRPVEQSPQEPDSSAGIGKSGAQPAKKRLNFGQTGDTESVPDPQPIGEPPAAPSGVGSLTMASGGGAPVADNNEGADGVGSSSGNWHCDSQWLGDRVITTSTRTWALPTYNNHLYKQISNSTSGGSSNDNAYFGYSTPWRYFDFNRFHCHFSPRDWQRLINNWGFRPKRLNFKLFNIQVKEVTDNNGVKTIANNLTSTVQAFTDSDYQLPYVLGSAHEGCLPPFPADVFMIPQYGYLTLNDGSQAVGRSSFYCLEYFPSQMLRTGNNFQFSYEFENVPFHSSYAHSQSLDRLMNPLIDQYLYYLSKTINGSGQNQQTLKFSVAGPSNMAVQGRNYIPGPSYRQQRVSTTVTQNNNSEFAWPGASSWALNGRNSLMNPGPAMASHKEGEDRFFPLSGSLIFGKQGTGRDNVDADKVMITNEEEIKTTNPVATESYGQVATNHQSAQAQAQTGWVQNQGILPGMVWQDRDVYLQGPIWAKIPHTDGNFHPSPLMGGFGMKHPPPQILIKNTPVPADPPTAFNKDELNSFITQYSTGQVSVEIEWELQKENSKRWNPEIQYTSNYYKSNNVEFAVNTEGVYSEPRPIGTRYLTRNL

SEQ ID NO: 697 - protein, 735 aa, Artificial Sequence
  Description of Artificial Sequence: Synthetic polypeptide
MAADGYLPDWLEDNLSEGIREWWALKPGAPQPKANQQHQDNARGLVLPGYKYLGPGNGLDKGEPVNAADAAALEHDKAYDQQLKAGDNPYLKYNHADAEFQERLKEDTSFGGNLGRAVFQDKKRLLEPLGLVEEAAKTAPGKKRPVEQSPQEPDSSAGIGKSGAQPAKKRLNFGQTGDTESVPDPQPIGEPPAAPSGVGSLTMASGGGAPVADNNEGADGVGSSSGNWHCDSQWLGDRVITTSTRTWALPTYNNHLYKQISNSTSGGSSNDNAYFGYSTPWGYFDFNRFHCHFSPRDWQRLINNWGFRPKRLNFKLFNIQVKEVTDNNGVKTIANNLTSTVQVFTDSDYQLPYVLGSAHEGCLPPFPADVFMIPQYGYLTLNDGSQAVGRSSFYCLEYFPSQMLRTGNNFQFSYEFENVPFHSSYAHSQSLDRLMNPLIDQYLYYLSKTINGSGQNQQTLKFSVAGPSNMAVQGRNYIPGPSYRQQRVSTTVTQNNNSEFAWPGASSWALNGRNSLMNPGPAMASHKEGEDRFFPLSGSLIFGKQGTGRDNVDADKVMITNEEEIKTTNPVATESYGQVATNHQSAQAQAQTGWVQNQGILPGMVWQDRDVYLQGPIWAKIPHTDGNFHPSPLMGGFGMKHPPPQILIKNTPVPADPPTAFNKDKLNSFITQYSTGQVSVEIEWELQKENSKRWNPEIQYTSNYYKSNNVEFAVNTEGVYSEPRPIGTRYLTRNL

SEQ ID NO: 698 - protein, 736 aa, Artificial Sequence
  Description of Artificial Sequence: Synthetic polypeptide
MAADGYLPDWLEDNLSEGIREWWALKPGAPQPKANQQHQDNARGLVLPGYKYLGPGNGLDKGEPVNAADAAALEHDKAYDQQLKAGDNPYLKYNHADAEFQERLKEDTSFGGNLGRAVFQAKKRLLEPLGLVEEAAKTAPGKKRPVEQSPQEPDSSAGIGKSGAQPAKKRLNFGQTGDTESVPDPQPIGEPPAAPSGVGSLTMASGGGAPVADNNEGADGVGSSSGNWHCDSQWLGDRAITTSTRTWALPTYNNHLYKQISNSTSGGSSNDNAYFGYSTPWGYFDFNRFHCHFSPRDWQRLINNNWGFRPKRLNFKLFNIQVKEVTDNNGVKTIANNLTSTVQVFTDSDYQLPYVLGSAHEGCLPPFPADVFMIPQYGYLTLNDGSQAVGRSSFYCLEYFPSQMLRTGNNFQFSYEFENVPFHSSYAHSQSLDRLMNPLIDQYLYYLSKTINGSGQNQQTLKFSVAGPSNMAVQGRNYIPGPSYRQQRVSTTVTQNNNSEFAWPGASSWALNGRNSLMNPGPAMASHKEGEDRFFPLSGSLIFGKQGTGRDNVDADKVMTTNEEEIKTTNPVATESYGQVATNHQSAQAQAQTGWVQNQGILPGMVWQDRDVYLQGPIWAKIPHTDGNFHPSPLMGGFGMKHPPPQILIKNTPVPADPPTAFNKDKLNSFITQYSTGQVSVEIEWELQKENSKRWNPEIQYTSNYYKSNNVEFAVNTEGVYSEPRPIGTRYLTRNL

SEQ ID NO: 699 - protein, 736 aa, Artificial Sequence
  Description of Artificial Sequence: Synthetic polypeptide
MAADGYLPDWLEDNLSEGIREWWALKPGAPQPKANQQHQDNARGLVLPGYKYLGPGNGLDKGEPVNAADAAALEHDKAYDQQLKAGDNPYLKYNHADAEFQERLKEDTSFGGNLGRAVFQTKKRLLEPLGLVEEAAKTAPGKKRPVEQSPQEPGSSAGIGKSGAQPAKKRLNFGQTGDTESVPDPQPIGEPPAAPSGVGSLTMASGGGAPVADNNEGADGVGSSSGNWHCDSQWLGDRVITTSTRTWALPTYNNHLYKQISNSTSGGSSNDNAYFGYSTPWGYFDFNRFHCHFSPRDWQRLINNNWGFRPKRLNFKLFNIQVKEVTDNNGVKTIANNLTSTVQVFTDSDYQLPYVLGSAHEGCLPPFPADVFMIPQYGYLTLNDGSQAVGRSSFYCLEYFPSQMLRTGNNFQFSYEFENVPFHSSYAHSQSLDRLMNPLIDQYLHYLSKTINGSGQNQQTLKFSVAGPSNMAVQGRNYIPGPSYRQQRVSTTVTQNNNSEFAWPGASSWALNGRNSLMNPGPAMASHKEGEDRFFPLSGSLIFGKQGTGRDNVDADKVMITNEEEIKTTNPVATESYGQVATNHQSAQAQAQTGWVQNQGILPGMVWQDRDVYLQGPIWAKIPHTDGNFHPSPLMGGFGMKHPPPQILIKNTPVPADPPTAFNKDKLNSFITQYSTGQVSVEIEWELQKENSKRWNPEIQYTSNYYKSNNVEFAVNTEGVYSEPRPIGTRYLTRNL

SEQ ID NO: 700 - protein, 736 aa, Artificial Sequence
  Description of Artificial Sequence: Synthetic polypeptide
MAADGYFPDWLEDNLSEGIREWWALKPGAPQPKANQQHQDNARGLVLPGYKYLGPGNGLDKGEPVNAADAAALEHDKAYDQQLKAGDNPYLKYNHADAEFQERLKEDTSFGGNLGRAVFQAKKRLLEPLGLVEEAAKTAPGKKRPVEQSPQEPDSSAGIGKSGAQPAKKRLNFGQTGDTESVPDPQPIGESPAAPSGVGSLTMASGGGAPVADNNEGADGVGSSSGNWHCDSQWLGDRVITTSTRTWALPTYNNHLYKQISNSTSGGSSNDNAYFGYSTPWGYFDFNRFHCHFSPRDWQRLINNNWGFRPKRLNFKLFNIQVKEVTDNNGVKTIANNLTSTVQVFTDSDYQLPYVLGSAHEGCLPPFPADVFMIPQYGYLTLNDGSQAVGRSSFYCLEYLPSQMLRTGNNFQFSYEFENVPFHSSYAHSQSLDRLMNPLIDQYLHYLSKTINGSGQNQQTLKFSVAGPSNMAVQGRNYIPGPSYRQQRVSTTVTQNNNSEFAWPGASSWALNGRNSLMNPGPAVASHKEGEDRFFPLSGSLIFGKQGTGRDNVDADKVMITNEEEIKTTNPVATESYGQVATNHQSAQAQAQTGWVQNQGILPGMVWQDRDVYLQGPIWAKIPHTDGNFHPSPLMGGFGMKHPPPQILIKNTPVPADPPTAFNKDKLNSFITQYSTGQVSVEIEWELQKENSKRWNPEIQYTSNYYKSNNVEFAVNTEGVYSEPRPIGTRYLTRNL

SEQ ID NO: 701 - protein, 736 aa, Artificial Sequence
  Description of Artificial Sequence: Synthetic polypeptide
MAADGYLPDWLEDNLSEGIREWWALKPGAPQPKANQQHQDNARGLVLPGYKYLGPGNGLDKGEPVNAADAAALEHDKAYDQQLKAGDNPYLKYNHADAEFQERLKEDTSFGGNLGRAVFQAKKRLLEPLGPVEEAAKTAPGKKRPVEQSPQEPDSSAGIGKSGAQPAKKRLNFGQTGDTESVPDPQPIGEPPAAPSGVGSLTMASGGGAPVADNNEGADGVGSSSGNWHCDSQWLGDRVITTSTRTWALPTYNNHLYKQISNSTSGGSSNDNAYFGYSTPWGYFDFNRFHCHFSPRDWQRLINNNWGFRPKRLNFKLFNIQVKEVTDNNGVKTIANNLTSTVQVFTDSDYQLPYVLGSAHEGCLPPFPADVFMIPQYGYLTLNDGSQAVGRSSFYCLEYFPSQMLRTGNNFQFSYEFENVPFHSSYAHSQSLDRLMNPLIDQYLYYLSKTINGSGQNQQTLKFSVAGPSNMAVQGRNYIPGPSYRQQRVSTTVTQNNNSEFAWPGASSWALNGRNSLMNPGPAMASHKEGEDRFFPLSGSLIFGKQGTGRDNVDADKVMITNEEEIKTTNPVATESYGQAATNHQSAQAQAQTGWVQNQGILPGMVWQDRDVYLQGPIWAKIPHTDGNFHPSPLMGGFGMKHPPPQILIKNTPVPADPPTAFNKDKLNSFITQYSTGQVSVEIEWELQKENSKRWNPEIQYTSNYYKSNNVEFAVNTEGVYSEPRPIGTRYLTRNL

SEQ ID NO: 702 - protein, 736 aa, Artificial Sequence
  Description of Artificial Sequence: Synthetic polypeptide
MAADGYLPDWLEDNLSEGIREWWALKPGAPQPKANQQHQDNARGLVLPGYKYLGPGNGLDKGEPVNAADAAALEHDKAYDQQLKAGDNPYLKYNHADAEFQERLKEDTSFGGNLGRAVFQAKKRLLEPLGPVEEAAKTAPGKKRPVEQSPQEPDSSAGIGKSGAQPAKKRLNFGQTGDTESVPDPQPIGEPPAAPSGVGSLTMASGGGAPVADNNEGADGVGSSSGNWHCDSQWLGDRVITTSTRTWALPTYNNHLYKQISNSTSGGSSNDNAYFGYSTPWGYFDFNRFHCHFSPRDWRRLINNNWGFRPKRLNFKLFNIQVKEVTDNNGVKTIANNLTSTVQVFTDSDYQLPYVLGSAHEGCLPPFPADVFMIPQYGYLTLNDGSQAVGRSSFYCLEYFPSQMLRTGNNFQFSYEFENVPFHSSYAHSQSLDRLMNPLIDQYLYYLSKTINGSGQNQQTLKFSVAGPSNMAVQGRNYIPGPSYRQQRVSTTVTQNNNSEFAWPGASSWALNGRNSLMNPGPAMASHKEGEDRFFPLSGSLIFGKQGTGRDNVDADKVMITNEEEIKTTNPVATESYGQVATNHQSAQAQAQTGWVQNQGILPGMVWQDRDVYLQGPIWAKIPHTDGNFHPSPLMGGFGMKHPPPQILIKNTPVPADPPTAFNKDKLNSFITQYSTGQVSVEIEWELQKENSKRWNPEIQYTSNYYKSNNVEFAVNTEGVYSEPRPIGTRYLTRNL

SEQ ID NO: 703 - protein, 736 aa, Artificial Sequence
  Description of Artificial Sequence: Synthetic polypeptide
MAADGYLPDWLEDNLSEGIREWWALKPGAPQPKANQQHQDNARGLVLPGYKYLGPGNGLDKGEPVNAADAAALEHDKAYDQQLKAGDNLYLKYNHADAEFQERLKEDTSFGGNLGRAVFQAKKRLLEPLGLVEEAAKTAPGKKRPVEQSPQEPDSSAGIGKSGAQPAKKRLNFGQTGDTESVPDPQPIGEPPAAPSGVGSLTMASGGGAPVADNNEGADGVGSSSGNWHCDSQWLGDRVITTSTRTWALPTYNNHLYKQISNSTSGGSSNDNAYFGYSTPWGYFDFNRFHCHFSPRDWQRLINNNWGFRPKRLNFKLFNIQVKEVTDNNGVKTIANNLTSTVQVFTDSDYQLPYVLGSAHEGCLPPFPADVFMIPQYGYLTLNDGSQAVGRSSFYCLEYFPSQMLRTGNNFQFSYEFENVPFHSSYAHSQSLDRLMNPLIDQYLHYLSKTINGSGQNQQTLKFSVAGPSNMAVQGRNYIPGPSYRQQRVSTTVTQNNNSEFAWPGASSWALNGRNSLMNPGPAMASHKEGEDRFFPLSGSLIFGKQGTGRDNVDADKVMITNEEEIKTTNPVATESYGQVATNHQSAQAQAQTGWVQNQGILPGMVWQDRDVYLQGPIWAKIPHTDGNFHPSPLMGGFGMKHPPPQILIKNTPVPADPPTAFNKDKLNSFITQYSTGQVSVEIEWELQKENSKRWNPEIQYTSNYYKSNNVEFAVNTEGVYSEPRPIGTRYLTRNL

SEQ ID NO: 704 - protein, 736 aa, Artificial Sequence
  Description of Artificial Sequence: Synthetic polypeptide
MAADGYLPDWLEDNLSEGIREWWALKPGAPQPKANQQHQDNARGLVLPGYKYLGPGNGLDKGEPVNAADAAALEHDKAYDQQLKAGDNPYLKYNHADAEFQERLKEDTSFGGNLGRAVFQAKKRLLEPLGLVEEAAKTAPGKKRPVEQSPQEPDSSAGIGKSGAQPAKKRLNFGQTGDTESVPDPQPIGEPPAAPSGVGSLTMASGGGAPVADNNEGADGVGSSSGNWHCDSQWLGDRVITTSTRTWALPTYNNHLYKQISNSTSGGSSNDNAYFGYSTPWGYFDFNRFHCHFSPRDWQRLINNNWGFRPKRLNFKLFNIQVKEVTDNNGVKTIANNLTSTVQVFTDSDYQLPYVLGSAHEGCLPPFPADVFMIPQYGYLTLNDGSQAVGRSSFYCLEYFPSQMLRTGNNFQFSYEFENVPFHSSYAHSQSLDRLMNPLIDQYLHYLSKTINGSGQNQQTLKFSVAGPSNMAVQGRNYIPGPSYRQQRVSTTVTQNNNSEFAWPGASSWALNGRNSLMNPGPAMASHKEGEDRFFPLSGSLIFGKQGTGRDNVDADKVMITNEEEIKTTNPVATESYGQVATNHQSAQAQAQTGWVQNQGILPGMVWQDRDVYLQGPIWAKIPHTDGNFHPSPLMGGFGMKHPPPQILIKNTPVPADPPTAFNKDKLNSFITQYSTGQVSVEIEWELQKENSKRWNPEIQYTSNYYKSNNVEFAVNTEGVYSEPRPIGTRYLTRNL

SEQ ID NO: 705 - protein, 736 aa, Artificial Sequence
  Description of Artificial Sequence: Synthetic polypeptide
  MOD_RES (442)..(442): Xaa = any amino acid
MAADGYLPDWLEDNLSEGIREWWALKPGAPQPKANQQHQDNARGLVLPGYKYLGPGNGLDKGEPVNAADAAALEHDKAYDQQLKAGDNPYLKYNHADAEFQERLKEDTSFGGNLGRAVFQAKKRLLEPLGLVEEAAKTAPGKKRPVEQSPQEPDSSAGIGKSGAQPAKKRLNFGQTGDTESVPDPQPIGEPPAAPSGVGSLTMASGGGAPVADNNEGADGVGSSSGNWHCDSQWLGDRVITTSTRTWALPTYNNHLYKQISTSTSGGSSNDNAYFGYSTPWGYFDFNRFHCHFSPRDWQRLINNNWGFRPKRLNFKLFNIQVKEVTDNNGVKTIANNLTSTVQVFTDSDYQLPYVLGSAHEGCLPPFPADVFMIPQYGYLTLNDGSQAVGRSSFYCLEYFPSQMLRTGNNFQFSYEFENVPFHSSYAHSQSLDRLMNPLIDXYLHYLSKTINGSGQNQQTLKFSVAGPSNMAVQGRNYIPGPSYRQQRVSTTVTQNNNSEFAWPGASSWALNGRNSLMNPGPAMASHKEGEDRFFPLSGSLIFGKQGTGRDNVDADKVMITNEEEIKTTNPVATESYGQVATNHQSAQAQAQTGWVQNQGILPDMVWQDRDVYLQGPIWAKIPHTDGNFHPSPLMGGFGMKHPPPQILIKNTPVPADPPTAFNKDKLNSFITQYSTGQVSVEIEWELQKENSKRWNPEIQYTSNYYKSNNVEFAVNTEGVYSEPRPIGTRYLTRNL

SEQ ID NO: 706 - protein, 736 aa, Artificial Sequence; identical to SEQ ID NO: 686
  Description of Artificial Sequence: Synthetic polypeptide

SEQ ID NO: 707 - protein, 736 aa, Artificial Sequence; identical to SEQ ID NO: 690
  Description of Artificial Sequence: Synthetic polypeptide

SEQ ID NO: 708 - protein, 736 aa, Artificial Sequence
  Description of Artificial Sequence: Synthetic polypeptide
MAADGYLPDWLEDNLSEGIREWWALKPGAPQPRANQQHQDNARGLVLPGYKYLGPGNGLDKGEPVNAADAAALEHDKAYDQQLKAGDNPYLKYNHADAEFQERLKEDTSFGGNLGRAVFQAKKRLLEPLGLVEEAAKTAPGKKRPVEQSPQEPDSSAGIGKSGAQPAKKRLNFGQTGDTESVPDPQPIGEPPAAPSGVGSLTMASGGGAPVADNNEGADGVGSSSGNWHCDSQWLGDRVITTSTRTWALPTYNNHLYKQISNSTSGGSSNDNAYFGYSTPWGYFDFNRFHCHFSPRDWQRLINNNWGFRPKRLNFKLFNIQVKEVTDNNGVKTIANNLTSTVQVFTDSDCQLPYVLGSAHEGCLPPFPADVFMIPQYGYLTLNDGSQAVGRSSFYCLEYFPSQMLRTGNNFQFSYEFENVPFHSSYAHSQSLDRLTNPLIDQYLYYLSKTINGSGQNQQTLKFSVAGPSNMAVQGRNYIPGPSYRQQRVSTTVTQNNNSEFAWPGASSWALNGRNSLMNPGPAMASHKEGEDRFFPLSGSLIFGKQGTGRDNVDADKVMITNEEEIKTTNPVATESHGQVATNHQSAQAQAQTGWVQNQGILPGMVWQDRDVYLQGPIWAKIPHTDGNFHPSPLMGGFGMKHPPPQILIKNTPVPADPPTAFNKDKLNSFITQYSTGQVSVEIEWELQKENSKRWNPEIQYTSNYYKSNNVEFAVNTEGVYSEPRPIGTRYLTRNL

SEQ ID NO: 709 - protein, 736 aa, Artificial Sequence
  Description of Artificial Sequence: Synthetic polypeptide
MAADGYLPDWLEDNLSEGIREWWALKPGAPQPKANQQHQDNARGLVLPGYKYLGPGNGLDKGEPVNAADAAALEHDKAYDQQLKAGDNPYLKYNHADAEFQERLKEDTSFGGNLGRAVFQAKKRLLEPLGLVEEAAKTAPGKKRPVEQSPQEPDSSAGIGKSGAQPAKKRLNFGQTGDTESVPDPQPIGEPPAAPSGVGSLTMASGGGAPVADNNEGADGVGSSSGNWHCDSQWLGDRVITTSTRTWALPTYNNHLYKQISNSTSGGSSNDNAYFGYSTPWGYFDFNRFHCHFSPRDWQRLINNNWGFRPKRLNFKLFNIQVKEVTDNNGVKTIANNLTSTVQVFTDSDYQLPYVLGSAHEGCLPPFPADVFMIPQYGYLTLNDGSQAVGRSSFYCLEYFPSQMLRTGNNFQFSYEFENVPFHSSYAHSQSLDRLMNPPIDQYLYYLSKTINGSGQNQQTLKFSVAGPSNMAVQGRNYIPGPSYRQQRVSTTVTQNNNSEFAWPGASSWALNGRNSLMNPGPAMASHKEGEDRFFPLSGSLIFGKQGTGRDNVDADKVMITNEEEIKTTNPVATESYGQVATNHQSAQAQAQTGWVQNQGILPGMVWQDRDVYLQGPIWAKIPHTDGNFHPSPLMGGFGMKHPPPQILIKNTPVPADPPTAFNKDKLNSFITQYSTGQVSVEIEWELQKENSKRWNPEIQYTSNYYKSNNVEFAVNTEGVYGEPRPIGTRYLTRNL

SEQ ID NO: 710 - protein, 736 aa, Artificial Sequence
  Description of Artificial Sequence: Synthetic polypeptide
MAADGYLPDWLEDNLSEGIREWWALKPGAPQPKANQQHQDNARGLVLPGYKYLGPGNGLDKGEPVNAADAAALEHDKAYDQQLKAGDNPYLKYNHADAEFQERLKEDTSFGGNLGRAVFQAKKRLLEPLGLVEEAAKTAPGKKRPVEQSPQEPDSSAGIGKSGAQPAKKRLNFGQTGDTESVPDPQPIGEPPAAPSGVGSLTMASGGGAPVADNNEGADGVGSSSGNWHCDSQWLGDRVITTSTRTWALPTYNNHLYKQISNSTSGGSSNDNAYFGYSTPWGYFDFNRFHCHFSPRDRQRLINNNWGFRPKRLNFKLFNIQVKEVTDNNGVKTIANNLTSTVQVFTDSDYQLPYVLGSAHEGCLPPFPADVFMIPQYGYLTLNDGSQAVGRSSFYCLEYFPSQMLRTGNNFQFSYEFENVPFHSSYAHSQSLDRLMNPLIDQYLYYLSKTINGSGQNQQTLKFSVAGPSNMAVQGRNYIPGPSYRQQRVSTTVTQNNNSEFAWPGASSWALNGRNSLMNPGPAMASHKEGEDRFFPLSGSLIFGKQGTGRDNVDADKVMITNEEEIKTTNPVATESYGQVATNHQSAQAQAQTGWVQNQGILPGMVWQDRDVYLQGPIWAKIPHTDGNFHPSPLMGGFGMKHPPPQILIKNTPVPADPPTAFNKDKLNSFITQYSTGQVSVEIEWELQKENSKRWNPEIQYTSNYYKSNNVEFAVNTEGVYSEPRPIGTRYLTRNL

SEQ ID NO: 711 - protein, 736 aa, Artificial Sequence
  Description of Artificial Sequence: Synthetic polypeptide
MAADGYLPDWLEDNLSEGIREWWALKPGAPQPKANQQHQDNARGLVLPGYKYLGPGNGLDKGEPVNAADAAALEHDKAYDQQLKAGDNPYLKYNHADAEFQERLKEDTSFGGNLGRAVFQAKKRLLEPLGLVEEAAKTAPGKKRPVEQSPQEPDSSAGIGKSGAQPAKKRLNFGQTGDTESVPDPQPIGEPPAAPSGVGSLTMASGGGAPVADNNEGADGVGSSSGNWHCNSQWLGDRVITTSTRTWALPTYNNHLYKQISNSTSGGSSNDNAYFGYSTPWGYFDFNRFHCHFSPRDWQRLINNNWGFRPKRLNFKLFNIQVKEVTDNNGVKTIANNLTSTVQVFTDSDYQLPYVLGSAHEGCLPPFPADVFMIPQYGYLTLNDGSQAVGRSSFYCLEYFPSQMLRTGNNFQFSYEFENVPFHSSYAHSQSLDRLMNPLIDQYLYYLSKTINGSGQNQQTLKFSVAGPGNMAVQGRNYIPGPSYRQQRVSTTVTQNNNSEFAWPGASSWALNGRNSLMNPGPAMASHKEGEDRFFPLSGSLIFGKQGTGRDNVDADKVMITNEEEIKTTNPVATESYGQVATNHQSAQAQAQTGWVQNQGILPGMVWQDRDVYLQGPIWAKIPHTDGNFHPSPLMGGFGMKHPPPQILIKNTPVPADPPTAFNKDKLNSFITQYSTGQVSVEIEWELQKENSKRWNPEIQYTSNYYKSNNVEFAVNTEGVYSEPRPIGTRYLTRNL

SEQ ID NO: 712 - protein, 736 aa, Artificial Sequence
  Description of Artificial Sequence: Synthetic polypeptide
MAADGYLPDWLEDNLSEGIREWWALKPGAPQPKANQQHQDNARGLVLPGYRYLGPGNGLDKGEPVNAADAAALEHDKAYDQQLKAGDNPYLKYNHADAEFQERLKEDTSFGGNLGRAVFQAKKRLLEPLGLVEEAAKTAPGKKRPVEQSPQEPDSSAGIGKSGAQPAKKRLNFGQTGDTESVPDPQPIGEPPAAPSGVGSLTMASGGGAPVADNNEGADGVGSSSGNWHCDSQWLGDRVITTSTRTWALPTYNNHLYKQISNSTSGGSSNDNAYFGYSTPWGYFDFNRFHCHFSPRDWQRLINNNWGFRPKRLNFKLFNIQVKEVTDNNGVKTVANNLTSTVQVFTDSDYQLPYVLGSAHEGCLPPFPADVFMIPQYGYLTLNDGSQAVGRSSFYCLEYFPSQMLRTGNNFQFSYEFENVPFHSSYAHSQSLDRLMNPLIDQYLYYLSKTINGSGQNQQTLKFSVAGPSNMAVQGRNYIPGPSYRQQRVSTTVTQNNNSEFAWPGASSWALNGRNSLMNPGPAMASHKEGEDRFFPLSGSLIFGKQGTGRDNVDADKVMITNEEEIKTTNPVATESYGQVATNHQSAQAQAQTGWVQNQGILPGMVWQDRDVYLQGPIWAKIPHTDGNFHPSPLMGGFGMKHPPPQILIKNTPVPADPPTAFNKDKLNSFITQYSTGQVSVEIEWELQKENSKRWNPEIQYTSNYYKSNNVEFAVNTEGVYSGPRPIGTRYLTRNL

SEQ ID NO: 713 - protein, 736 aa, Artificial Sequence; identical to SEQ ID NO: 123
  Description of Artificial Sequence: Synthetic polypeptide

SEQ ID NO: 714 - protein, 736 aa, Artificial Sequence
  Description of Artificial Sequence: Synthetic polypeptide
MAADGYLPDWLEDNLSEGIREWWALKPGAPQPKANQQRQDNARGLVLPGYKYLGPGNGLDKGEPVNAADAAALEHDKAYDQQLKAGGNPCLKYNHADAEFQERLKEDTSFGGNLGRAVFQAKKRLLEPLGLVEEAAKTAPGKKRPVEQSPQEPDSSAGIGRSGAQPAKKRLNFGQTGDTESVPDPQPIGEPPAAPSGVGSLTMASGGGAPVADNNEGADGVGSSSGNWHCDSQWLGDRVITTSTRTWALPTYNNHLYKQISNSTSGGSSNDNAYFGYSTPWGYFDFNRFHCHFSPRDWQRLINNNWGFRPKRLNFKLFNIQVKEVTDNNGVKAIANNLTSTVQVFTDSDYQLPYVLGSAHEGCLPPFPADVFMIPQYGYLTLNDGSQAVGRSSFYCLEYFPSQMLRTGNNFQFSYEFENVPFHSSYAHSQSLDRLMNPLIDQYLYYLSKTIDGSGQNQQTLKFSVAGPSNMAVQGRNYIPGPSYRQQRVSTTVTQNNNSEFAWPGASSWALNGRNSLMDPGPAMASHKEGEDRFFPLSGSLIFGKQGTGRDNVDADKVMITNEEEIKTTNPVATESYGQVATNHQSAQAQAQTGWVQNQGILPGMVWQDRDVYLQGPIWAKIPHTGGNFHPSPLMGGFGMKHPPPQILIKNTPVPADPPTAFNKDKLNSFITQYSTGQVSVEIEWELQKENSKRWNPEIQYTSNYYKSNNVEFAVNTEGVYSEPRPIGTRYLTRNL

SEQ ID NO: 715 - protein, 736 aa, Artificial Sequence
  Description of Artificial Sequence: Synthetic polypeptide
MAADGYLPDWLEDNLSEGIREWWALKPGAPQPKANQQHQDNARGLVLPGYKYLGPGNGLDKGEPVNAADAAALEHDKAYDQQLKAGDNPYLKYNHADAEFQERLKEDTSFGGNLGRAVFQAKKRLLEPLGLVEEAAKTAPGKKRPVEQSPQEPDSSAGIGKSGAQPAKKRLNFGQTGDTESVPDPQPIGEPPAAPSGVGSLTMASGGGAPVADNNEGADGVGSSSGNWHCDSQWLGDRVITTSTRTWALPTYNNHLYKQISNSTSGGSSNDNAYFGYSTPWGYFDFNRFHCHFSPRDWQRLINNNWGFRPKRLNFKLFNIQVKEVTDNNGVKTIANNLTSTVQVFTDSDYQLPYVLGSAHEGCLPPFPADVFMIPQYGYLTLNDGSQAVGRSSFYCLEYFPSQMLRTGNNFQFSYEFENVPFHSSYAHSQSLDRLMNPLIDQYLYYLSKTINGSGQNQQTLKFSVAGPSNMAVQGRNYIPGPSYRQQRVSTTVTQNNNSEFAWPGASSWALNGRNSLMNPGPAMASHKEGEDRFFPLSGSLIFGKQGTGRDNVDADKVMITNEEEIKTTNPVATESYGQVATNHQSAQAQAQTGWVQNQGILPGMVWQDRDVYLQGPIWAKIPHTDGNFHPSPLMGGFGMKHPPPQILIKNTPVPADPPTAFNKDKLNSFITQYSTGQVSVEIEWELQKENSKRWNPEIQYTSNYYKPNNVEFAVNTEGVYSEPRPIGTRYLTRNL

SEQ ID NO: 716 - protein, 736 aa, Artificial Sequence
  Description of Artificial Sequence: Synthetic polypeptide
MAADGYLPDWLEDNLSEGIREWWALKPGAPQPKANQQHQDNARGLVLPGYKYLGPGNGLDKGEPVNAADAAALEHNKAYDQQLKAGDNPYLKCNHADAEFQERLKEDTSFGGNLGRAVFQAKKRPLEPLGLVEEAAKTAPGKKRPVEQSPQEPDSSAGIGKSGAQPAKKRLNFGQTGDTESVPDPQPIGEPPAAPSGVRSLTMASGGGAPVADNNEGADGVGSSSGNWHCDSQWLGDRVITTSTRTWALPTYNNHLYKQISNSTSGGSSNDNAYLGYSTPWGYFDFNRFHCHFSPRDWQRLINNNWGFRPKRLNFKLFNIQVKEVTDNNGVKTIANNLTSTVQVFTDSDYQLPYVLGSAHEGCLPPFPADVFMIPQYGYLTLNDGSQAVGRSSFYCLEYFPSQMLRTGNNFQFSYEFENVPFHSSYAHSQSLDRLMNPLIDQYLYYLSKTINGSGQNQQTLKFSVAGPSNMAVQGRNYIPGPSYRQQRVSTTVTQNNNSEFAWPGASSWALNGRNSLMNPGPTMASHKEGEDRFFPLSGSLIFGKQGTGRDNVDADKVMITNEEEIKTTNPVATESYGQVATNHQSAQAQAQTGWVQNQGILPGMVWQDRDVYLQGPIWAKIPHTDGNFHPSPLMGGFGMKHPPPQILIKNTPVPADPPTAFNKDKLNSFITQYSTGQVSVEIEWELQKENSKRWNPEIQYTSNYYKSNNVEFAVNTEGVYSEPRPIGTRYLTRNL

SEQ ID NO: 717 - protein, 736 aa, Artificial Sequence
  Description of Artificial Sequence: Synthetic polypeptide
MAADGYLPDWLEDNLSEGIREWWALKPGAPQPKANQQHQDNARGLVLPGYKYLGPGNGLDKGEPVNAADAAALVHDKAYDQQLKAGDNPYLKCNHADAEFQERLKEDTSFGGNLGRAVFQAKKRLLEPLGLVEEAAKTAPGKKRPVEQSPQEPDSSAGIGKSGAQPAKKRLNFGQTGDTESVPDPQPIGEPPAAPSGVGSLTMASGGGAPVADNNEGADGVGSSSGNWHCDSQWLGDRVITTSTRTWALPTYNNHLYKQISNSTSGGSSNDNAYLGYSTPWGYFDFNRFHCHFSPRDWQRLINNNWGFRPKRLNFKLFNIQVKEVTDNNGVKTIANNLTSTVQVFTDSDYQLPYVLGSAHEGCLPPFPADVFTIPQYGYLTLNDGSQAVGRSSFYCLEYFPSQMLRTGNNFQFSYEFENVPFHSSYAHSQSLDRLMNPLIDQYLYYLSKTINGSGQNQQTLKFSVAGPSNMAVQGRNYIPGPSYRQQRVSTTVTQNNNSEFAWPGASSWALNGRNSLMNPGPAMASHKEGEDRFFPLSGSLIFGKQGTGRDNVDADKVMITNEEEIKTTNPVATESYGQVATNHQSAQAQAQTGWVQNQGILPGMVWQDRDVYLQGPIWAKIPHTDGNFHPSPLMGGFGMKHPPPQILIKNTPVPADPPTAFNKDKLNSFITQYSTGQVSVEIEWELQKENSKRWNPEIQYTSNYYKSNNVEFAVNTEGVYSEPRPIGPRYLTRNF

SEQ ID NO: 718 - protein, 736 aa, Artificial Sequence
  Description of Artificial Sequence: Synthetic polypeptide
MAADGYLPDWLEDNLSEGIREWWALKPGAPQPKANQQHQDNARGLVLPGYKYLGPGNGLDKGEPVNAADAAALEHNKAYDQQLKAGDNPYLKCNHADAEFQERLKEDTSFGGNLGRAVFQAKKRLLEPLGLVEEAAKTAPGKKRPVEQSPQEPDSSAGIGKSGAQPAKKRLNFGQTGDTESVPDPQPIGEPPAAPSGVRSLTMASGGGAPVADNNEGADGVGSSSGNWHCDSQWLGDRVITTSTRTWALPTYNNHLYKQISNSTSGGSSNDNAYLGYSTPWGYFDFNRFHCHFSPRDWQRLINNNWGFRPKRLNFKLFNIQVKEVTDNNGVKTIANNLTSTVQVFTDSDYQLPYVLGSAHEGCLPPFPADVFMIPQYGYLTLNDGSQAVGRSSFYCLEYFPSQMLRTGNNFQFSYEFENVPFHSSYAHSQSLDRLMNPLIDQYLYYLSKTINGSGQNQQTLKFSVAGPSNMAVQGRNYIPGPSYRQQRVSTTVTQNNNSEFAWPGASSWALNGRNSLMNPGPAMASHKEGEDRFFPLSGSLIFGKQGTGRDNVDADKVMITNEEEIKTTNPVATESYGQVATNHQSAQAQAQTGWVQNQGILPGMVWQDRDVYLQGPIWAKIPHTDGNFHPSPLMGGFGMKHPPPQILIKNTPVPADPPTAFNKDKLNSFITQYSTGQVSVEIEWELQKENSKRWNPEIQYTSNYYKSNNVEFAVNTEGVYSEPRPIGTRYLTRNL

SEQ ID NO: 719 - protein, 736 aa, Artificial Sequence
  Description of Artificial Sequence: Synthetic polypeptide
MAADGYLPDWLEDNLSEGIREWWALKPGAPQPKANQQHQDNARGLVLPGYKYLGPGNGLDKGEPVNAADAAALEHDKAYDQQLKAGDNPYLKCNHADAEFQERLKEDTSFGGNLGRAVFQAKKRLLEPLGLVEEAAKTAPGKKRPVEQSPQEPDSSAGIGKSGAQPAKKRLNFGQTGDTESVPDPQPIGEPPAAPSGVGSLTMASGGGAPVADNNEGADGVGSSSGNWHCDSQWLGDRVITTSTRTWALPTYNNHLYKQISNSTSGGSSNDNAYLGYSTPWGYFDFNRFHCHFSPRDWQRLINNNWGFRPKRLNFELFNIQVKEVTDNNGVKTIANNLTSTVQVFTDSDYQLPYVLGSAHEGCLPPFPADVFMIPQYGYLTLNDGSQAVGRSSFYCLEYFPSQMLRTGNNFQSSYEFENVPFHSSYAHSQSLDRLMNPLIDQYLYYLSKTINGSGQNQQTLKFSVAGPSNMAVQGRNYIPGPSYRQQRASTTVTQNNNSEFAWPGASSWALNGRNSLMNPGPAMASHKEGEDRFFPLSGSLIFGKQGTGRDNVDADKVMITNEEEIKTTNPVATESYGQVATNHQSAQAQAQTGWVQNQGILPGMVWQDRDVYLQGPIWAKIPHTDGNFHPSPLMGGFGMKHPPPQILIKNTPVPADPPTAFNKDKLNSFITQYSTGQVSVEIEWELQKENSKRWNPEIQYTSNYYKSNNVEFAVNTEGVYSEPRPIGTRYLTRNL

SEQ ID NO: 720 - protein, 736 aa, Artificial Sequence
  Description of Artificial Sequence: Synthetic polypeptide
MAADGYLPDWLEDNLSEGIREWWALKPGAPQPKANQQHQDNARGLVLPGYKYLGPGNGLDKGEPVNAADAAALEHDKAYDQQLKAGDNPYLKCNHADAEFQERLKEDTSFGGNLGRAVFQAKKRLLEPLGLVEEAAKTAPGKKRPVEQSPQEPDSSAGIGKSGAQPAKKRLNFGQTGDTESVPDPQPIGEPPAAPPGVGSLTMASGGGAPVADNNEGADGVGSSSGNWHCDSQWLGDRVITTSTRTWALPTYNNHLYKQISNSTSGGSSNDNAYLGYSTPWGYFDFNRFHCHFSPRDWQRLINNNWGFRPKRLNFKLFNIQVKEVTDNNGVKTIANNLTSTVQVFTDSDYQLPYVLGSAHEGCLPPFPADVFMIPQYGYLTLNDGSQAVGRSSFYCLEYFPSQMLRTGNNFQFSYEFENVPFHSSYAHSQSLDRLMNPLIDQYLYYLSKTISGSGQNQQTLKFSVAGPSNMAVQGRNYIPGPSYRQQRVSTTVTQNNSSEFAWPGASSWALNGRNSLMNPGPAMASHKEGEDRFFPLSGSLIFGKQGTGRDNVDADKVMITNEEEIKTTNPVATESYGQVATNHQSAQAQAQTGWVQNQGILSGMVWQDRDVYLQGPIWAKIPHTDGNFHPSPLMGGFGMKHPPPQILIKNTPVPADPPTAFNKDKLNSFITQYSTGQVSVEIEWELQKENSKRWNPEIQYTSNYYKSNNVEFAVNTEGVYSEPRPIGTRYLTRNL

SEQ ID NO: 721 - protein, 736 aa, Artificial Sequence
  Description of Artificial Sequence: Synthetic polypeptide
MAADGYLPDWLEDNLSEGIREWWALKPGAPQPKANQQHQDNARGLVLPGYKYLGPGNGLDKGEPVNAADAAALEHDKAYDQQLKAGDNPYLKCNHADAEFQERLKEDTSFGGNLGRAVFQAKKRLLEPLGLVEEAAKTAPGKKRPVEQSPQEPDSSAGIGKSGAQPAKKRLNFGQTGDTESVPDPQPIGEPPAAPSGVGSLTMASGGGAPVADNNEGADGVGSSSGNWHCDSQWLGDRVITTSTRTWALPTYNNHLYKQISNSTSGGSSNDNAYLGYSTPWGYFDFNRFHCHFSPRDWQRLINNNWGFRPKRLNFKLFNIQVKEVTDNNGVKTIANNLTSTVQVFTDSDYQLPYVLGSAHEGCLPPFPADVFMIPQYGYLTLNDGSQAVGRSSFYCLEYFPSQMLRTGNNFQFSYEFENVPFHSSYAHSQSLDRLMNPLIDQYLYYLSKTINGSGQNQQTLKFSVAGPSNMAVQGRNYIPGPSYRQQRVSTTVTQNNNSEFAWPGASSWALNGRNSLMNPGPAMASHKEGEDRFFPLSGSLIFGKQGTGRDNVDADKVMITNEEEIKTTNPVATESYGQVATNHQSAQAQAQTGWVQNQGILPGMVWQDRDVYLQGPIWAKIPHTDGNFHPSPLMGGFGMKHPPPQILIKNTPVPADPPTAFNKDKLNSFITQYSTGQVSVEIEWELQKENSKRWNPEIQYTSNYYKSNNVEFAVNTEGVYSEPRPIGTRYLTRNL

SEQ ID NO: 722 - protein, 736 aa, Artificial Sequence; identical to SEQ ID NO: 721
  Description of Artificial Sequence: Synthetic polypeptide

SEQ ID NO: 723 - protein, 736 aa, Artificial Sequence
  Description of Artificial Sequence: Synthetic polypeptide
MAADGYLPDWLEDNLSEGIREWWALKPGAPQPKANQQHQDNARGLVLPGYKYLGPGNGLDKGEPVNAADAAALEHDKAYDQQLKAGDNPYLKCNHADAEFQERLKEDTSFGGNLGRAVFQAKKRLLEPLGLVEEAAKTAPGKKRPVEQSPQEPDSSAGIGKSGAQPAKKRLNFGQTGDTESVPDPQPIGEPPAAPSGVGSLTMASGGGAPVADNNEGADGVGSSSGNWHCDSQWLGDRVITTSTRTWALPTYNNHLYKQISNSTSGGSSNDNAYLDYSTPWGYFDFNRFHCHFSPRDWQRLINNNWGFRPKRLNFKLFNIQVKEVTDNNGVKTIANNLTSTVQVFTDSDYQLPYVLGSAHEGCLPPFPADVFMIPQYGYLTLNDGSQAVGRSSFYCLEYFPSQMLRTGNNFQFSYEFENVPFHSSYAHSQSLDRLMNPLIDQYLYYLSKTINGSGQNQQTLKFSVAGPSNMAVQGRNYIPGPSYRQQRVSTTVTQNNNSEFAWPGASSWALNGRNSLMNPGPAMASHKEGEDRFFPLSGSLIFGKQGTGRDNVDADKVMITNEEEIKTTNPVATESYGQVATNHQSAQAQAQTGWVQNQGILPGMVWQGRDVYLQGPIWAKIPHTDGNFHPSPLMGGFGMKHPPPQILIKNTPVPADPPTAFNKDKLNSFITQYSTGQVSVEIEWELQKENSKRWNPEIQYTSNYYKSNNVEFAVNTEGVYSEPRPIGTRYLTRNL

SEQ ID NO: 724 - protein, 736 aa, Artificial Sequence; identical to SEQ ID NO: 721
  Description of Artificial Sequence: Synthetic polypeptide

SEQ ID NO: 725 - protein, 736 aa, Artificial Sequence
  Description of Artificial Sequence: Synthetic polypeptide
MAADGYPPDWLEDNLSEGIREWWALKPGAPQPKANQQHQDNARGLVLPGYKYLGPGNGLDKGEPVNAADAAALEHDKAYDQQLKAGDNPHLKYNHADAEFQERLKEDTSFGGNLGRAVFQAKKRLLEPLGLVEEAAKTAPGKKRPVEQSPQEPDSSAGIGKSGAQPAKKRLNFGQTGDTESVPDPQPIGEPPAAPSGVGSLTMASGGGAPVADNNEGADGVGSSSGNWHCDSQWLGDRVITTSTRTWALPTYNNHLYKQISNSTSGGSSNDNAYFGYSTPWGYFDFNRFHCHFSPRDWQRLINNNWGFRPKRLNFKLFNIQVKEVTDNNGVKTIANNLTSTVQVFTDSDYQLPYVLGSAHEGCLPPFPADVFMIPQYGYLTLNDGSQAVGRSSFYCLEYFPSQMLRTGNNFQFSYEFENVPFHSSYAHSQSLDRLMNPLIDQYLYYLSKTINGSGQNQQTLKFSVAGPSNMAVQGRNYIPGPSYRQQRVSTTVTQNNNSEFAWPGASSWALNGRNSLMNPGPAMASHKEGEDRFFPLSGSLIFGKQGTGRDNVDADKVMITNEEEIKTTNPVATESYGQVATNHQSAQAQAQTGWVQNQGILPGMVWQDRDVYLQGPIWAKIPHTDGNFHPSPLMGGFGVKHPPPQILIKNTPVPADPPTAFNKDRLNSFITQYSTGQVSVEIEWELQKENSKRWNPEIQYTSNYYKSNNVEFAVNTEGVYSEPRPIGTRYLTRNL

SEQ ID NO: 726 - protein, 736 aa, Artificial Sequence
  Description of Artificial Sequence: Synthetic polypeptide
MAADGYLPDWLEDNLSEGIREWWALKPGAPQPKANQQHQDNARGLVLPGYKYLGPGNGLDKGEPVNAADAAALEHDKAYDQQLKAGDNPYLKYNHADAEFQERLKEDTSFGGNLGRAVFQAKKRLLEPLGLVEEAAKTAPGKKRPVEQSPQEPDSSAGIGKSGAQPAKKRLNFGQTGDTESVPDPQPIGEPPAAPSGVGSLTMASGGGAPVADNNEGADGVGSSSGNWHCDSQWLGDRVITTSTRTWALPTYNNHLYKQISNSTSGGSSNDNAYFGYSTPWGYFDFNRFHCHFSPRDWQRLINNNWGFRPKRLNFKLFNIQVKEVTDNNGVKTIANNLTSTVQVFTDSDYQLPYVLGSAHEGCLPPFPADVFMIPQYGYLTLNDGSQAVGRSSFYCLEYFPSQMLRTGNNFQFSYEFENVPFHSSYAHSQSLDRLMNPLIDQYLYYLSKTINGSGQNQQTLKFSVAGPSNMAVQGRNYIPGPSYRQQRVSTTVTQNNNSEFAWPGASSWALNGRNSLMNPGPAMASHKEGEDRFFPLSGSLIFGKQGTGRDNVDADKVMITNEEEIKTTNPVATESYGQVATNHQSAQAQAQTGWVQNQGILPGMVWQDRDVYLQGPIWAKIPHTDGNFHPSPLMGGFGVKHPPPQILIKNTPVPADPPTAFNKDKLNSFITQYSTGQVSVEIEWELQKENSKRWNPEIQYTSNYYKSNNVEFAVNTEGVYSEPRPIGTRYLTRNL

SEQ ID NO: 727 - protein, 736 aa, Artificial Sequence
  Description of Artificial Sequence: Synthetic polypeptide
MAADGYLPDWLEDNLSEGIREWWALKPGAPQPKANQQHQDNARGLVLPGYKYLGPGNGLDKGEPVNAADAAALEHDKAYDQQLKAGDNPYLKYNHADAEFQERLKEDTSFGGNLGRAVFQAKKRLLEPLGLVEEAAKTAPGKKRPVEQSPQEPDSSAGIGKSGAQPAKKRLNFGQTGDTESVPDPQPIGEPPAAPSGVGSLTMASGGGAPVADNNEGADGVGSSSGNWHCDSQWLGDRVITTSTRTWALPTYNNHLYKQISNSTSGGSSNDNAYFGYSTPWGYFDFNRFHCHFSPRDWQRLTNNNWGFRPKRLNFKLFNIQVKEVTDNNGVKTIANNLTSTVQVFTDSDYQLPYVLGSAHEGCLPPFPADVFMIPQYGYLTLNDGSQAVGRSSFYCLEYIPSQMLRTGNNFQFSYEFENVPFHSSYAHSQSLDRLMNPLIDQYLYYLSKTINGSGQNQQTLKFSVAGPSNMAVQGRNYIPGPSYRQQRVSTTVTQNNNSEFAWPGASSWALNGRNSLMNPGPAMASHKEGEDRFFPLSGSLIFGKQGTGRDNVDADKVMITNEEEIKTTNPVATESYGQVATNHQSAQAQAQTGWVQNQGILPGMVWQDRDVYLQGPIWAKIPHTDGNFHPSPLMGGFGVKHPPPQILIKNTPVPADPPTAFNKDKLNSFITQYSTGQVSVEIEWELQKENSKRWNPEIQYTSNYYKSNNVEFAVNTEGVYSEPRPIGTRYLTRNL

SEQ ID NO: 728 - protein, 736 aa, Artificial Sequence
  Description of Artificial Sequence: Synthetic polypeptide
MAADGYLPDWLEDNLSEGIREWWALKPGAPQPKANQQHQDNARGLVLPGYKYLGPGNGLDKGEPVNAADAAALEHDKAYDQQLKAGDNPYLKYNHADAEFQERLKEDTSFGGNLGRAVFQAKKRLLEPLGLVEEAAKTAPGKKRPVEQSPQEPDSSAGIGKSGAQPAKKRLNFGQTGDTESVPDPQPIGEPPAAPSGVGSLTMASGGGAPVADNNEGADGVGSSSGNWHCDSQWLGDRVITTSTRTWALPTYNNHLYKQISNSTSGGSSNDNAYFGYSTPWGYFDFNRFHCHFSPRDWQRLINNNWGFRPKRLNFKLFNIQVKEVTDNNGVKTIANNLTSTVQVFTDSDYQLPYVLGSAHEGCLPPFPADVFMIPQYGYLTLNDGSQAVGRSSFYCLEYFPSQMLRTGNNFQFSYEFENVPFHSSYAHSQSLDRLMNPLIDQYLYYLSKTINGSGQNQQTLKFSVAGPSNMAVQGRNYIPGPSYRQQRVSTTVTQNNNSEFAWPGASSWALNGRNSLMNPGPAMASHKEGEDRFFPLSGSLISGKQGTGRDNVDANKVMITNEEEIKTTNPVATESYGQVATNHQSAQAQAQTGWVQNQGILPGMVWQDRDVYLQGPIWAKIPHTDGNFHPSPLMGGFEMKHPPPQILIKNTPVPADPPTAFNKDKLNSFITQYSTGQVSVEIEWELQKENSKRWNPEIQYTSNYYKSNNVEFAVNTEGVYSEPRPIGTRYLTRNL

SEQ ID NO: 729 - protein, 736 aa, Artificial Sequence
  Description of Artificial Sequence: Synthetic polypeptide
MAADGYLPDWLEDNLSEGIREWWALKPGAPQPKANQQHQDNARGLVLPGYKYLGPGNGLDKGEPVNAADAAALEHDKAYDQQLKAGDNPYLKYNHADAEFQERLKEDTSFGGNLGRAVFQAKKRLLEPLGLVEEAAKTAPGKKRPVEQSPQEPDSSAGIGKSGAQPAKKRLNFGQTGDTESVPDPQPIGEPPAAPSGVGSLTIASGGGAPVADNNEGADGVGSSSGNWHCDSQWLGDRVITTSTRTWALPTYNNHLYKRISNSTSGGSSNDNAYFGYSTPWGYFDFNRFHCHFSPRDWQRLINNNWGFRPKRLNFKLFNIRVKEVTDNNGVKTITNNLTSTVQVFTDSDYQLPYVLGSAHEGCLPPFPADVFMIPQYGYLTLNDGSQAVGRSSFYCLEYFPSQMLRTGNNFQFSYEFENVPFHSSYAHSQSLDRLMNPLIDQYLYYLSKTINGSGQNQQTLKFSVAGPSNMAVQGRNYIPGPSYRQQRVSTTVTRNNNSEFAWPGASSWALNGRNSLMNPGPAMASHKEGEDRFFPLSGSLIFGKQGTGRDNVDADKVMITNEEEIKTTNPVATESYGQVATNHQSAQAQAQTGWVQNQGILPGMVWQDRDVYLQGPIWAKIPHTDGNFHPSPLMGGFGVKHPPPQILIKNTPVPADPPTAFNKDKLNSFITQYSTGQVSVEIEWELQKENSKRWNPEIQYTSNYYKSNNVEFAVNTEGVYSEPRPIGTRYLTRNL

SEQ ID NO: 730 - protein, 736 aa, Artificial Sequence
  Description of Artificial Sequence: Synthetic polypeptide
MAADGYLPDWLEDNLSEGIREWWALKPGAPQPKANQQHQDNARGLVLPGYKYLGPGNGLDKGEPVNAADAAALEHDKAYDQQLKAGDNPYLKYNHADAEFQERLKEDTSFGGNLGRAVFQAKKRLLEPLGLVEEAAKTAPGKKRPVEQSPQEPDSSAGIGKSGAQPAKKRLNFGQTGDTEPVPDPQPIGEPPAAPSGVGSLTMASGGGAPVADNNEGADGVGSSSGNWHCDSQWLGDRVITTSTRTWALPTYNNHLYKQISNSTSGGSSNDNAYFGYSTPWGYFDFNRFHCHFSPRDWQRLINNNWGFRPKRLNFKLFNIQVKEVTDNNGVKTIANNLTSTVQVFTDSDYQLPYVLGSAHEGCLPPFPAGVFMIPQYGYLTLNDGSQAVGRSSFYCLEYFPSQMLRTGNNFQFSYEFENVPFHSSYAHSQSLDRLMNPLIDQYLYYLSKTINGSGQNQQTLKFSVAGPSNMAVQGRNYIPGPSYRQQRVSTTATQNNNSEFAWPGASSWALNGRNSLMNPGPAMASHKEGEDRFFPLSGSLIFGKQGTGRDNVDADKVMITNEEEIKTTNPVATESYGQVATNHQSAQAQAQTGWVQNQGILPGMVWQDRDVYLQGPIWAKIPHTDGNFHPSPLMGGFGMKHPPPQILIKNTPVPADPPTAFNKDKLNSFITQYSTGQVSVEIEWELQKENSKRWNPEIQYTSNYYKSNNVEFAVNTEGVYSEPRPIGTRYLTRNL

SEQ ID NO: 731 - protein, 736 aa, Artificial Sequence
  Description of Artificial Sequence: Synthetic polypeptide
MAADGYLPDWLEDNLSEGIREWWALKPGAPQPKANQQHQDNARGLVLPGYKYLGPGNGLDKGEPVNAADAAALEHDKAYDQQLKAGDNPYLKYNHADAGFQERLKEDTSFGGNLGRAVFQAKKRLLEPLGLVEEAAKTAPGKKRPVEQSPQEPDSSAGIGKSGAQPAKKRLNFGQTGDTESVPVPQPIGEPPAAPSGVGSLTMASGGGAPVADNNEGADGVGSSSGNWHCDSQWLGDRVITTSTRTWALPTYNNHLYKQISNSTSGGSSNDNAYFGYSTPWGYFDFNRFHCHFSPRDWQRLINNNWGFRPKRLNFKLFNIQVKEVTDNNGVKTIANNLTSTVQVFTDSDYQLPYVLGSAHEGCLPPFPADVFMIPQYGYLTLNDGSQAVGRSSFYCLEYFPSQMLRTGNNFQFSYEFENVPFHSSYAHSQSLDRLMNPLIDQYLYYLSKTINGSGQNQQTLKFSVAGPSNMAVQGRNYIPGPSYRQQRVSTTVTQNNNSEFAWPGASSWALNGRNSLMNPGPAMASHKEGEDRFFPLSGSLIFGKQGAGRDNVDADKVMITNEEEIKTTNPVATESYGQVATNHQSAQAQAQTGWVQNQGILPGMVWQDRDVYLQGPIWAKIPHTDGNFHPSPLMGGFGMKHPPPQILIKNTPVPADPPTAFNKDKLNSFITQYSTGQVSVEIEWELQKENSKRWNPEIQYTSNYYKSNNVEFAVNTEGVYSEPRPIGTRYLTRNL

SEQ ID NO: 732 - protein, 736 aa, Artificial Sequence
  Description of Artificial Sequence: Synthetic polypeptide
  MOD_RES (126)..(126): Xaa = any amino acid
MAADGYLPDWLEDNLSEGIRERWALKPGAPQPKANQQHQDNARGLVLPGYKYLGPGNGLDKGEPVNAADAAALEHDKAYDQQLKAGDNPYLKYNHADAEFQERLKEDTSFGGNLGRAVFQAKKRLXEPLGLVEEAAKTAPGKKRPVEQSPQEPDSSAGIGKSGAQPAKKRLNFGQTGDTESVPDPQPIGEPPAAPSGVGSLTMASGGGAPVADNNEGADGVGSSSGNWHCDSQWLGDRVITTSTRTWALPTYNNHLYKQISNSTSGGSSNDNAYFGYSTPWGYFDFNRFHCHFSPRDWQRLINNNWGFRPKRLNFKLFNIQVKEVTDNNGVKTIANNLTSTVQVFTDSDYQLPYVLGSAHEGCLPPFPADVFMIPQYGYLTLNDGSQAVGRSSFYCLEYFPSQMLRTGNNFQFSYEFENVPFHSSYAHSQSPDRLMNPLIDQYLYYLSKTINGSGQNQQTLKFSVAGPSNMAVQGRNYIPGPSYRQQRVSTTVTQNNNSEFAWPGASSWALNGRNSLMNPGPAMASHKEGEDRFFPLSGSLIFGKQGTGRDNVDADKVMITNEEEIKTTNPVATESYGQVATNHQSAQAQAQTGWVQNQGILPGMVWQDRDVYLQGPIWAKIPHTDGNFHPSPLMGGFGVKHPPPQILIKNTPVPADPPTAFNKDKLNSFITQYSTGQVSVEIEWELQKENSKRWNPEIQYTSNYYKSNNVEFAVNTEGVYSEPRPIGTRYLTRNL

SEQ ID NO: 733 - protein, 736 aa, Artificial Sequence
  Description of Artificial Sequence: Synthetic polypeptide
MAADGYLPDWLEDNLSEGIREWWALKPGAPQPKANQQHQDNARGLVLPGYKYLGPGNGLDKGEPVNAADAAALEHDKAYDQQLKAGDNPYLKYNHADAEFQERLKEDTSFGGNLGRAVFQAKKRLLEPLGLVEEAAKTAPGKKRPVEQSPQEPDSSAGIGKSGAQPAKKRLNFGQTGDTESVPDPQPIGEPPAAPSGVGSLTMASGGGAPVADNNEGADGVGSSSGNWHCDSQWLGDRVITTSTRTWALPTYNNHLYKQISNSTSGGSSNDNAYLGYSTPWGYFDFNRFHCHFSPRDWQRLINNNWGFRPKRLNFKLFNIQVKEVTDNNGVKTIANNLTSTVQVFTDSDYQLPYVLGSAHEGCLPPFPADVFMIPQYGYLTLNDGSQAVGRSSFYCLEYFPSQMLRTGNNFQFSYEFENVPFHSSYAHSQSLDRLMNPLIDQYLYYLSKTINGSGQNQQTLKFSVAGPSNMAVQGRNYIPGPSYRQQRVSTTVTQNNNSEFAWPGASSWALNGRNSLMNPGPAMASHKEGEDRFFPLSGSLIFGKQGTGRDNVDADKVMITNEEEIKTTNPVATESYGQVATNHQSAQAQAQTGWVQNQGILPGMVWQDRDVYLQGPIWAKIPHTDGNFHPSPLMGGFGMKHPPPQILIKNTPVPADPPTAFNKDKLNSFITQYSTGQVSVEIEWELQKENSKRWNPEIQYTSNYYKSNNVEFAVNTEGVYSEPRPIGTRYLTRNL

SEQ ID NO: 734 - protein, 736 aa, Artificial Sequence
  Description of Artificial Sequence: Synthetic polypeptide
MAADGYLPDWLEDNLSEGIREWWALKPGAPQPKANQQHQDNARGLVLPGYKYLGPGNGLDKGEPVNAADAAALEHDKAYDQQLKAGDNPYLKYNHADAEFQERLKEDTSFGGNLGRAVFQAKKRLLEPLGLVEEAAKTAPGKKRPVEQSPQEPDSSAGIGKSGAQPAKKRLNFGQTGDTESVPDPQPIGEPPAAPSGVGSLTMASGGGAPVADNNEGADGVGSSSGNWHCDSQWLGDRVITTSTRTWALPTYNNHLYKQISNSTSGGSSNDNAYFGYSTPWGYFDFNRFHCHFSPRDWQRLINNNWGFRPKRLNFKLFNIQVKEVTDNNGVKTIANNLTSTVQVFTDSDYQLPYVLGSAHEGCLPPFPADVFMIPQYGYLTLNDGSQAVGRSSFYCLEYFPSQMLRTGNNFQFSYEFENVPFHSSYAHSQSLDRLMNPLIDQYLYYLSKTINGSGQNQQTLKFSVAGPSNMAVQGRNYIPGPSYRQQRVSTTVTQNNNSEFAWPGASSWALNGRNSLMNPGPAMASHKEGEDRFFPLSGSLIFGKQGTGRDNVDADKVMITNEEEIKTTNPVATESYGQVATNHQSAQAQAQTGWVQNQGILPGMVWQDRDVYLQGPIWAKIPHTDGNFHPSPLMGGFGMKHPPPQILIKNTPVPADPPTAFNKDKLDSFITQYSTGQVSVEIEWELQKENSKRWNPVIQYTSNYYKSNNVEFAVNTEGVYSEPRPIGTRYLTRNL

SEQ ID NO: 735 - protein, 736 aa, Artificial Sequence
  Description of Artificial Sequence: Synthetic polypeptide
MAADGYLPDWLEDNLSEGIREWWDLKPGAPKPKANQQKQDDGRGLVLPGYKYLGPFNGLDKGEPVNAADAAALEHDKAYDQQLKAGDNPYLRYNHADAEFQERLQEDTSFGGNLGRAVFQAKKRVLEPLGLVEEGAKTAPGKKRPVEQSPQEPDSSSGIGKTGQQPAKKRLNFGQTGDSESVPDPQPLGEPPATPAAVGPTTMASGGGAPMADNNEGVDGVGNASGNWHCDSTWLGDRVITTSTRTWALPTYNNHLYKQISSASTGASNDNHYFGYSTPWGYFDFNRFHCHFSPRDWQRLINNNWGFRPKRLNFKLFNIQVKEVTTNDGVTTIANNLTSTVQVFSDSEYQLPYVLGSAHQGCLPPFPADVFMIPQYGYLTLNNGSQAVGRSSFYCLEYFPSQMLRTGNNFTFSYTFEEVPFHSSYAHSQSLDRLMNPLIDQYLYYLNRTQNQSGSAQNKDLLFSRGSPAGMSVQPKNWLPGPCYRQQRVSKTKTDNNNSNFTWTGASKYNLNGRESIINPGTAMASHKDDEDKFFPMSGVMIFGKESAGASNTALDNVMITDEEEIKATNPVATERFGTVAVNFQSSSTDPATGDVHAMGALPGMVWQDRDVYLQGPIWAKIPHTDGHFHPSPLMGGFGLKNPPPQILIKNTPVPANPPAEFSATKLASFITQYSTGQVSVEIEWELQKENSKRWNPEVQYTSNYAKSANVDFTVDNNGLYTEPRPIGTRYLTRPL

SEQ ID NO: 736 - protein, 736 aa, Artificial Sequence
  Description of Artificial Sequence: Synthetic polypeptide
MAADGYLPDWLEDNLSEGIREWWDLKPGAPKPKANQQKQDDGRGLVLPGYKYLGPFNGLDKGEPVNAADAAALEHDKAYDQQLKAGDNPYLRYNHADAEFQERLQEDTSFGGNLGRAVFQAKKRVLEPLGLVEEGAKTAPGKRRPVEQSPQEPDSSSGIGKTGQQPAKKRLNFGQTGDSESVPDPQPLGEPPATPAAVGPTTMASGGGAPMADNNEGADGVGNASGNWHCDSTWLGDRVITTSTRTWALPTYNNHLYKQISSASTGASNDNHYFGYSTPWGYFDFNRFHCHFSPRDWQRLINNNWGFRPKRLNFKLFNIQVKEVTTNDGVTTIANNLTSTVQVFSDSEYQLPYVLGSAHQGCLPPFPADVFMIPQYGYLTLNNGSQAVGRSSFYCLEYFPSQMLRTGNNFTFSYTFEEVPFHSSYAHSQSLDRLMNPLIDQYLYYLNRTQNQSGSAQNKDLLFSRGSPAGMSVQPKNWLPGPCYRQQRVSKTKTDNNNSNFTWTGASKYNLNGRESIINPGTAMASHKDDEDKFFPMSGVMIFGKESAGASNTALDNVMITDEEEIKATNPVATERFGTVAVNFQSSSTDPATGDVHAMGALPGMVWQDRDVYLQGPIWAKIPHTDGHFHPSPLMGGFGLKNPPPQILIKNTPVPANPPAEFSATKFASFITQYSTGQVSVEIEWELQKENSKRWNPEVQYTSNYAKSANVDFTVDNNGLYTEPRPIGTRYLTRPL

SEQ ID NO: 737 - protein, 736 aa, Artificial Sequence
  Description of Artificial Sequence: Synthetic polypeptide
MAADGYLPDWLEDNLSEGIREWWDLKPGAPKPKANQQKQDDGRGLVLPGYKYLGPFNGLDKGEPVNAADAAALEHDKAYDQQLKAGDNPYPRYNHADAEFQERLQEDTSFGGNLGRAVFQAKKRVLEPLGLVGEGAKTAPGKKRPVEQSPQEPDSSSGIGKTGQQPAKKRLNFGQTGDSESVPDPQPLGEPPATPAAVGPTTMASGGGAPMADNNEGADGVGNASGNWHCDSTWLGDRVITTSTRTWALPTYNNHLYKQISSASTGASNDNHYFGYSTPWGYFDFNRFHCHFSPRDWQRLINNNWGFRPKRLNFKLFNIQVKEVTTNDGVTTIANNLTSTVQVFSDSEYQLPYVLGSAHQGCLPPFPADVFMIPQYGYLTLNNGSQAVGRSSFYCLEYFPSQMLRTGNNFTFSYTFEEVPFHSSYAHSQSLDRLMNPPIDQYLYYLNRTQNQSGSAQNKDLLFSRGSPAGMSVQPKNWLPGPCYRQQRVSKTKTDNNNSNFTWTGASKYNLNGRESIINPGTAMASHKDDEDKFFPMSGVMIFGKESAGASNTALDNVMITDEEEIKATNPVATERFGTVAVNFQSSSTDPATGDVHAMGALPGMVWQDRDVYLQGPIWAKIPHTDGHFHPSPLMGGFGLKNPPPQILIKNTPVPANPPAEFSATKFASFITQYSTGQVSVEIEWELQKENSKRWNPEVQYTSNYAKSANVDFTVDNNGLYTEPRPIGTRYLTRPL

SEQ ID NO: 738 - protein, 736 aa, Artificial Sequence
  Description of Artificial Sequence: Synthetic polypeptide
MAADGYLPDWLEDNLSEGIREWWDLKPGAPKPKANQQKQDDGRGLVLPGYKYLGPFNGLDKGEPVNAADAAALEHDKAYDQQLKAGDNPYLRYNHADAEFQERLQEDTSFGGNLGRAVFQAKKRVLEPLGLVEEGAKTAPGKKRPVEQSPQEPDSSSGIGKTGQQPAKKRLNFGQTGDSESVPDPRPLGEPPATPAAVGPTTMASGGGAPMADNNEGADGVGNASGNWHCDSTWLGDRVITTSTRTWALPTYNNHLYKQISSASTGASNDNHYFGYSTPWGYFDFNRFHCHFSPRDWQRLINNNWGFRPKRLNFKLFNIQVKEVTTNDGVTTIANNLTSTVQVFSDSEYQLPYVLGSAHQGCLPPFPADVFMIPQYGYLTLNNGSQAVGRSSFYCLEYFPSQMLRTGNNFTFSYTFEEVPFHSSYAHSQSLDRLMNPLIDQYLYYLNRTQNQSGSAQNKDLLFSRGPPAGMSVQPKNWLPGPCYRQQRVSKTKTDNNNSNFTWTGASKYNLNGRESIINPGTAMASHKDDEDKFFPMSGVMIFGKESAGASNTALDNVMITDEEEIKATNPVATERFGTVAVNFQSSSTDPATGDVHAMGALPGMVWQDRDVYLQGPIWAKIPHTDGHFHPSPLMGGFGLKNPPPQILIKNTPVPANPPAEFSATKFASFITQYSTGQVSVEIEWELQKENSKRWNPEVQYTSNYAKSANVDFTVDNNGLYTEPRPIGTRYLTRPL

SEQ ID NO: 739 - protein, 736 aa, Artificial Sequence
  Description of Artificial Sequence: Synthetic polypeptide
MAADGYLPDWLEDNLSEGIREWWDLKPGAPKPKANQQKQDDGRGLVLPGYKYLGPFNGLDKGEPVNAADAAALEHDKAYDQQLKAGDNPYLRYNHADAEFQERLQEDTSFGGNLGRAVFQAKKRVLEPLGLVEEGAKTAPGKKRPVEQSPQEPDSSSGIGKTGQQPAKKRLNFGQTGGSESVPDPQPLGEPPATPAAVGPTTMASGGGAPMADNNEGADGVGNASGNWHCDSTWLGDRVITTSTRTWALPTYNNHLYKQISSASTGASNDNHYFGYSTPWGYFDFNRFHCHFSPRDWQRLINNNWGFRPKRLNFKLFNIQVKEVTTNDGVTTIANNLTSTVQVFSDSEYQLPYVLGSAHQGCLPPFPADVFMIPQYGYLTLNNGSQAVGRSSFYCLEYFPSQMLRTGNNFTFSYTFEEVPFHSSYAHSQSLDRLMNPPIDQYLYYLNRTQNQSGSAQNKDLLFSRGSPAGMSVQPKNWLPGPCYRQQRVSKTKTDNNNSNFTWTGASKYNLNGRESIINPGTAMASHKDDEDKFFPMSGVMIFGKESAGASNTALDNVMITDEEEIKATNPVATERFGTVAVNFQSSSTDPATGDVHAMGALPGMVWQDRDVYLQGPIWAKIPHTDGHFHPSPLMGGFGLKNPPPQILIKNTPVPANPPAEFSATKFASFITQYSTGQVSVEIEWELQKENSKRWNPEVQYTSNYAKSANVDFTVDNNGLYTEPRPIGTRYLTRPL

SEQ ID NO: 740 - protein, 736 aa, Artificial Sequence
  Description of Artificial Sequence: Synthetic polypeptide
MAADGYLPDWLEDNLSEGIREWWDLKPGAPKPKANQQKQDDGRGLVLPGYKYLGPFNGLDKGEPVNAADAAALEHDKAYDQQLKAGDNPYLRYNHADAEFQERLQEDTSFGGNLGRAVFQAKKRVLEPLGLVEEGAKTAPGKKRPVEQSPQEPDSSSGIGKTGQQPAKKRLNFGQTGDSESVPDPQPLGEPPATPAAVGPTTMASGGGAPMADNNEGADGVGNASGNWHCDSTWLGDRVITTSTRTWALPTYNNHLYKQISSASTGASNDNHYFGYSTPWGYFDFNRFHCHFSPRDWQRLINNNWGFRPKRLNFKLFNIQVKEVTTNDGVTTIANNLTSTVQVFSDSEYQLPYVLGSAHQGCLPPFPADVFMIPQYGYLTLNNGSQAVGRSSFYCLEYFPSQMLRTGNNFTFSYTFEEVPFHSSYAHSQSLDRLMNPLIDQYLYYLNRTQNQSGSAQNKDLLFSRGSPAGMSVQPKNWLPGPCYRQQRVSKTKTDNNNSNFTWTGASKYNLNGRESIINPGTAVASHKDDEDKFFPMSGVMIFGKESAGASNTALDNVMITDEEEIKATNPVATERFGTVAVNFQSSSTDPATGDVHAMGALPGMVWQDRDVYLQGPIWAKIPHTDGHFHPSPLMGGFGLKNPPPQILIKNTPVPANPPAEFSATKFASFITQYSTGQVSVEIEWELQKENSKRWNPEVQYTSNYAKSANVDFTVDNNGLYTEPRPIGTRYLTRPL

SEQ ID NO: 741 - protein, 736 aa, Artificial Sequence
  Description of Artificial Sequence: Synthetic polypeptide
MAADGYLPDWLEDNLSEGIREWWDLKPGAPKPKANQQKQDDGRGLVLPGYKYLGPFNGLDKGEPVNAADAAALEHDKAYDQQLKAGDNPYLRYNHADAEFQERLQEDTSFGGNLGRAVFQAKKRVLEPLGLVEEGAKTAPGKKRPVEQSPQEPDSSSGIGKTGQQPAKKRLNFGQTGDSESVPDPQPLGEPPATPAAVGPTTMASGGGAPMADNNEGADGVGNASGNWHCDSTWLGDRVITTSTRTWALPTYNNHLYKQISSASTGASNDNHYFGYSTPWGYFDFNRFHCHFSPRDWQQLINNNWGFRPKRLNFKLFNIQVKEVTTNDGVTTIANNLTSTVQVFSDSEYQLPYVLGSAHQGCLPPFPADVFMIPQYGYLTLNNGSQAVGRSSFYCLEYFPSQMLRTGNNFTFSYTFEEVPFHSSYAHSQSLDRLMNPLIDQYLYYLNRTQNQSGSAQNKDLLFSRGSPAGMSVQPKNWLPGPCYRQQRVSKTKTDNNNSNFTWTGASKYNLNGRESIINPGTAMASHKDDEDKFFPMSGVMIFGKESAGASNTALDNVMITDEEEIKATNPVATERFGTVAVNFQSTSTDPATGDVHAMGALPGMVWQDRDVYLQGPIWAKIPHTDGHFHPSPLMGGFGLKNPPPQILIKNTPVPANPPAEFSATKFASFITQYSTGQVSVEIEWELQKENSKRWNPEVQYTSNYAKSADVDFTVDNNGLYTEPRPIGTRYLTRPL

SEQ ID NO: 742 - protein, 736 aa, Artificial Sequence
  Description of Artificial Sequence: Synthetic polypeptide
MAADGYLPDWLEDNLSEGIREWWDLKPGAPKPKANQQKQDDGRGLVLPGYKYLGPFNGLDKGEPVNAADAAALEHDKAYDQQLKAGDNPYLRYNHADAEFQERLQEDTSFGGNLGRAVFQAKKRVLEPLGLVEEGAKTAPGKKRPVEQSPQEPDSSSGIGKTGQQPAKKRLNFGQTGDSESVPDPQPLGEPPATPAAVGPTTMASGGGAPMADNNEGADGVGNASGNWHCDSTWLGDRVITTSTRTWALPTYNNHLYKQISSASTGASNDNHYFGYSTPWGYFDFNRFHCHFSPRDWQRLINNNWGFRPKRLNFKLFNIQVKEVTTNDGVTTIANNLTSTVQVFSDSEYQPPYVLGSAHQGCLPPFPADVFMIPQYGHLTLNNGSQAVGRSSFYCLEYFPSQMLRTGNNFTFSYTFEEVPFHSSYAHSQSLDRLTNPLIDQYLYYLNRTQNQSGSAQNKDLLFSRGSPAGMSVQPKNWLPGPCYRQQRVSKTKTDNNNSNFTWTGASKYNLNGRESIINPGTAMASHKDDEDKFFPMSGVMIFGKESAGASNTALDNVMITDEEEIKATNPVATERFGTVAVNFQSSSTDPATGDVHAMGALPGMVWQDRDVYLQGPIWAKIPHTDGHFHPSPLMGGFGLKNPPPQILIKNTPVPANPPAEFSATKFASFITQYSTGQVSVEIEWELQKENSKRWNPEVQYTSNYAKSANVDFTVDNNGLYTEPRPIGTRYLTRPL

SEQ ID NO: 743 - protein, 736 aa, Artificial Sequence
  Description of Artificial Sequence: Synthetic polypeptide
MAADGYLPDWLEDNLSEGIREWWDLKPGAPKPKANQQEQDDGRGLVLPGYKYLGPFNGLDKGEPVNAADAAALEHDKAYDQQLKAGDNPYLRYNHADAEFQERLQEDTSFGGNLGRAVFQAKKRVLEPLGLVEEGAKTAPGKKRPVEQSPQEPDSSSGIGKTGQQPAKKRLNFGQTGDSESVPDPQPLGEPPATPAAVGPTTMASGGGAPMADNNEGADGVGNASGNWHCDSTWLGDRVITTSTRTWALPTYNNHLYKQISSASTGASNDNHYFGYSTPWGYFDFNRFHCHFSPRDWQRLINNNWGFRPKRLNFKLFNIQVKEVTTNDGVTTIANNLTSTVQVFSDSEYQLPYVLGSAHQGCLPPFPADVFMIPQYGYLTLNNGSQAVGRSSFYCLEYFPSQMLRTGNNFTFSYTFEEVPFHSSYAHSQSLDRLMNPLIDQYLYYLNRTQNQSGSAQNKDLLFSRGSPAGMSVQPKNWLPGPCYRQQRVSKTKTDNNNSNFTWTGASKYNLNGRESIINPGTAMASHKDDEDKFFPMSGVMIFGKESAGASNTALDNVMITDEEEIKATNPVATERFGTVAVNFQSSSTDPATGDVHATGTLPGMVWQDRDVYLQGPIWAKIPHTDGHFHPSPLMGGFGLKNPPPQILIKTTPVPANPPAEFSATKFASFITQYSTGQVSVEIEWELQKENSKRWNPEVQYTSNYAKSANVDFTVDDNGLYTEPRPIGTRYLTRPL

SEQ ID NO: 744 - protein, 736 aa, Artificial Sequence
  Description of Artificial Sequence: Synthetic polypeptide
MAADGYLPDWLEDNLSEGIREWWDLKPGAPKPKANQQKQDDGRGLVLPGYKYLGPFNGLDKGEPVNAADAAALEHDKAYDQQLKAGDNPYLRYNHADAEFQERLQEDTSFGGNLGRAVFQAKKRVLEPLGLVEEGAKTAPGKKRPVEQSLQEPDSSSGIGKTGQQPAKKRLNFGQTGDSESVPDPQPLGEPPATPAAVGPTTMASGGGAPMADNNEGADGVGNASGNWHCDSTWLGDRVITTSTRTWALPTYNNHLYKQISSASTGASNDNHYFGYSTPWGYFDFNRFHCHFSPRDWQRLINNNWGFRPKRLNFKLFNIQVKEVTTNDGVTTIANNLTSTVQVFSDSEYQLPYVLGSAHQGCLPPFPADVFMIPQYGYLTLNNGSQAVGRSSFYCLEYFPSQMLRTGNNFTFSYTFEEVPFHSSYAHSQSLDRLMNPLIDQYLYYLNRTQNQSGSAQNKDLLFSRGSPAGMSVQPKNWLPGPCYRQQRVSKTKTDNDNSNFTWTGASKYNLNGRESIINPGTAMASHKDDEDKFFPMSGVMIFGKESAGASNTALDNVMITDEEEIKATNPVATERFGTVAVNFQSSSTDPATGDVHAMGALPGMVWQDRDVYLQGPIWAKIPHTDGHFHPSPLMGGFGLKNPPPQILIKNTPVPANPPAEFSATKFASFITQYSTGQVSVEIEWELQKENSKRWNPEVQYTSNYAKSANVDFTVDNNGLYTEPRPIGTRYLTRPL

SEQ ID NO: 745 - protein, 736 aa, Artificial Sequence
  Description of Artificial Sequence: Synthetic polypeptide
MAADGYLPDWLEDNLSEGIREWWDLKPGAPKPKANQQKQDDGRGLVLPGYKYLGPFNGLDKGEPVNAADAAALEHDKAYDQQLKAGDNPYLRYNHADAEFQERLQEDTSFGGNLGRAVFQAKKRVLEPLGLVEEGAKTAPGKKRPVEQSPQEPDSSSGIGKTGQQPAKKRLNFGQTGDSESVPDPQPLGEPPATPAAVGPTTMASGGGAPMADNNEGADGVGNASGNWHCDSTWLGDRVITTSTRTWALPTYNNHLYKQISSASTGASNDNHYFGYSTPWGYFDFNRFHCHFSPRDWQRLINNNWGFRPKRLNFKLFNIQVKEVTTNDGVTTIANNLTSTVQVFSDSEYQLPYVLGSAHQGCLPPFPADVFMIPQYGYLTLNNGSQAVGRSSFYCLEYFPSQMLRTGNNFTFSYTFEEAPFHSSYAHSQSLDRLMNPLIDQYLYYLNRTQNQSGSAQNKDLLFSRGSPAGMSVQPKNWLPGPCYRQQRVSKTKTDNNNSNFTWTGASKYNLNGRESIINPGTAMASHKDDEDKFFPMSGVMIFGKESAGASNTALDNVMITDEEEIKATNPVATERFGTVAVNFQSSSTDPATGDVHAMGALPGMVWQDRDVYLQGPIWAKIPHTDGHFHPSPLMGGFGLKNPPPQILIKNTPVPANPPAEFSATKFASFITQYSTGQVSVEIEWELQKENSKRWNPEVQYTSNYAKSANVDFTVDNNGLYTEPRPVGTRYLTRPL

SEQ ID NO: 746 - protein, 736 aa, Artificial Sequence
  Description of Artificial Sequence: Synthetic polypeptide
MAADGYLPDWLEDNLSEGIREWWDLKPGAPKPKANQQKQDDGRGLVLPGYKYLGPFNGLDKGEPVNAADAAALEHDKAYDQQLKAGDNPYLRYNHADAEFQERLQENTSFGGNLGRAVFQAKKRVLEPLGLVEEGAKTAPGKKRPVEQSPQEPDSSSGIGKTGQQPAKKRLNFGQTGDSESVPDPQPLGEPPATPAAVGPTTMASGGGAPMADNNEGADGVGNASGNWHCDSTWLGDRVITTSTRTWALPTYNNHLYKQISSASTGASNDNHYFGYSTPWGYFDFNRFHCHFPPRDWQRLINNNWGFRPKRLNFKLFNIQVKEVTSNDGVTTIANNLTSTVQVFSDSEYQLPYVLGSAHQGCLPPFPADVFMIPQYGYLTLNNGSQAVGRSSFYCLEYFPSQMLRTGNNFTFSYTFEEVPFHSSYAHSQSLDRLMNPLIDQYLYYLNRTQNQSGSAQNKDLLFSRGSPAGMSVQPKNWLPGPCYRQQRVSKTKTDNNNSNFTWTGASKYNLNGRESIINPGTAMASHKDDEDKFFPMSGVMIFGKESAGASNTALDNVMITDEEEIKATNPVATERFGTVAVNFQSSSTDPATGDVHAMGALPGMVWQDRDVYLQGPIWAKIPHTDGHFHPSPLMGGFGLKNPPPQILIKNTPVPANPPAEFSATKFASFITQYSTGQVSVEIEWELQKENSKRWNPEVQYTSNYAKSANVDFTVDNNGLYTEPRPIGTRYLTRPL

SEQ ID NO: 747 - protein, 736 aa, Artificial Sequence
  Description of Artificial Sequence: Synthetic polypeptide
MAADGYLPDWLEDNLSEGIREWWDLKPGAPKPKANQQKQDDGRGLVLPGYKYLGPFNGLDKGEPVNAADAAALEHDKAYDQQLKAGDNPYLRYNHADAEFQERLQEDTSFGGNLGRAVFQAKKRVLEPLGLVEEGAKTAPGKKRPVEQSPQEPDSSSGIGKTGQQPAKKRLNFGQTGDSESVPDPQPLGEPPATPAAVGPTTMASGGGAPMADNNEGADGVGNASGNWHCDSTWLGDRVITTSTRTWALPTYNNHLYKQISSASTGASNDNHYFGYSTPWGYFDFNRFHCHFSPRDWQRLINNNWGFRPKRLNFKLFNIQVKEVTTNDGVTTIANNLTSTVQVFSDSEYQLPYVLGSAHQGCLPPFPADVFMIPQYGYLTLNNGSQAVGRSSFYCLEYFPSQMLRTGNNFTFSYTFEEVPFHSSYAHSQSLDRLMNPLIDQYLYYLNRTQNQSGSAQNKDLLFSRGSPAGTSVQPKNWLPGPCYRQQRVSKTKTDNNNSNFTWTGASKYNLNGRESIINPGTAMASHKDDEDKFFPMSGVMIFGKESAGASNTALDNVMITDEEEIKATNPVATERFGTVAVNFQSSSTDPATGDVHAMGALPGMVWQDRDVYLQGPIWAKIPHTDGHFHPSPLMGGFGLKNPPPQILIKNTPVPANPPAEFSATKFASFITQYSTGQVSVEIEWELQKENSKRWNPEVQYTSNYAKSANVDFTVDNNGLYTGPRPIGTRYLTRPL

SEQ ID NO: 748 - protein, 736 aa, Artificial Sequence
  Description of Artificial Sequence: Synthetic polypeptide
MAADGYLPDWLEDNLSEGIREWWDLKPGAPKPKANQQKQDDGRGLVLPGYKYLGPFNGLDKGEPVNAADAAALEHDKAYDQQLKAGDNPYLRYNHADAEFQERLQEDTSFGGNLGRAVFQAKKRVLEPLGLVEEGAKTAPGKKRPVEQSPQEPDSSSGIGKTGQQPAKKRLNFGQTGDSESVPDPQPLGEPPATPAAVGPTTMASGGGAPMADNNEGADGVGNAPGNWHCDSTWLGDRVITTSTRTWALPTYNNHLYKQISSASTGASNDNHYFGYSTPWGYFDFNRFHCHFSPRDWQRLINNNWGFRPKRLNFKLFNIQVKEVTTNDGVTTIANNLTSTVQVFSDSEYQLPYVLGSAHQGCLPPFPADVFMIPQYGYLTLNNGSQAVGRSSFYCLEYFPSQMLRTGNNFTFSYTFEEVPFHSSYAHSQSLDRLMNPLIDQYLYYLNRTQNQSGSAQNKDLLFSRGSPAGMSVQPKNWLPGPCYRQQRVSKTKTDNNNSNFTWTGASKYNLNGRESIINPGTAMASHKDDEDKFFPMSGVMIFGKESAGASNTALDNVMITGEEEIKATNPVATERFGTVAVNFQSSSTDPATGDVHAMGALPGMVWQDRDVYLQGPIWAKIPHTDGHFHPSPLMGGFGLKNPPPQILIKNTPVPANPPAEFSATKFASFITQYSTGQVSVEIEWELQKENSKRWNPEVQYTSNYAKSANVDFTVDNNGLYTEPRPIGTRYLTRPL

SEQ ID NO: 749 - protein, 736 aa, Artificial Sequence
  Description of Artificial Sequence: Synthetic polypeptide
MAADGYLPDWLEDNLSEGIREWWDLKPGAPKPKANQQKQDDGRGLVLPGYKYLGPFNRLDKGEPVNAADAAALEHDKAYDQQLKAGDNPYLRYNHADAEFQERLQEDTSFGGNLGRAVFQAKKRVLEPLGLVEEGAKTAPGRKRPVEQSPQEPDSSSGIGKTGQQPAKKRLNFGQTGDSESVPDPQPLGEPPATPAAVGPTTMASGGGAPMADNNEGADGVGNASGNWHCDSTWLGDRVITTSTRTWALPTYNNHLYKQISSASTGASNDNHYFGYSTPWGYFDFNRFHCHFSPRDWQRLINNNWGFRPKRLNFKLFNIQVKEVTTNDGVTTIANNLTSTVQVFSDSEYQLPYVLGSAHQGCLPPFPADVFMIPQYGYLTLNNGGQAVGRSSFYCLEYFPSQMLRTGNNFTFSYTFEEVPFHSSYAHSQSLDRLMNPLIDQYLYYLNRTQNQSGSAQNKDLLFSRGSPAGMSVQPKNWLPGPCYRQQRVSKTKTDNNNSNFTWTGASKYSLNGRESIINPGTAMASHKDDEDKFFPMGGVMIFGKESAGASNTALDNAMITDEEEIKATNPVATERFGTVAVNFQSSSTDPATGDVHAMGALPGMVWQDRDVYLQGPIWAKIPHTDGHFHPSPLMGGFGLKNPPPQILIKNTPVPANPPAEFSATKFASFITQYSTGQVSVEIEWELQKENSKRWNPEVQYTSNYAKSANVDFTVDNNGLYTEPRPIGTRYLTRPL

SEQ ID NO: 750 - protein, 736 aa, Artificial Sequence
  Description of Artificial Sequence: Synthetic polypeptide
MAADGYLPDWLEDNLSEGIREWWDLKPGAPKPKANQQKQDDGRGLVLPGYKYLGPFNGLDKGEPVNAADAAALEHDKAYDQQLKAGDNPYLRYNHADAEFQERLQEDTSFGGNLGRAVFQAKKRVLEPLGLVEEGAKTAPGKKRPVEQSPQEPDSSSGIGKTGQQPAKKRLNFGQTGDSESVPDPQPLGEPPATPAAVGPTTMASGGGAPMADNNEGADGVGNASGNWHCDSTWLGGRVITTSTRTWALPTYNNHLYKQISSASTGASNDNHYFGYSTPWGYFDFNRFHCHFSPRDWQRLINNNWGFRPKRLNFKLFNIQVKEVTTNDGVTTIANNLTSTVQVFSDSEYQLPYVLGSAHQGCLPPFPADVFMIPQYGYLTLNNGSQAVGRSSFYCLEYFPSQMLRTGNNSTFSYTFEEVPFHSSYAHSQSLDRLMNPLIDQYLYYLNRTQNQSGSAQNKDLLFSRGSPAGMSVQPKNWLPGPCYRQQRVSKTKTDNNNSNFTWTGASKYNLNGRESIINPGTAMASHKDDEDKFFPMSGVMIFGKESAGASNTALDNVMITDEEEIKATNPVATERFGTVAVNFQSSSTDPATGDVHAMGTLPGMVWQDRDVYLQGPIWAKIPHTDGHFHPSPLMGGFGLKNPPPQILIKNTPVPANPPAEFSATKFASFITQYSTGQVSVEIEWELQKENSKRWNPEVQYTSNYAKSANVDFTVDNNGLYTEPRPIGTRYLTRPL

SEQ ID NO: 751 - protein, 736 aa, Artificial Sequence
  Description of Artificial Sequence: Synthetic polypeptide
MAADGYLPDWLEDNLSEGIREWWDLKPGAPKPKANQQKQDDGRGLVLPGYKYLGPFNGLDKGEPVSAADAAALEHDKAYDQQLKAGDNPYLRYNHADAEFQERLQEDTSFGGNLGRAVFQAKKRVLEPLGLVEEGAKTAPGKKRPVEQSPQEPDSSSGIGKTGQQPAKERLNFGQTGDSESVPDPQPLGEPPATPAAVGPTTMASGGGAPMADNNEGADGVGNASGNWHCDSTWLGDRVITTSTRTWALPTYNNHLYKQISSASTGASNDNHYFGYSTPWGYFDFNRFHCHFSPRDWQRLINNNWGFRPKRLNFKLFNIQVKEVTTNDGVTTIANNLTSTVQVFSDSEYQLPYVLGSAHQGCLPPFPADVFMIPQYGYLTLNNGSQAVGRSSFYCLEYFPSQMLRTGNNFTFSYTFEEVPFHSSYAHSQSLDRLMNPLIDQYLYYLNRTQNQSGSAQNKDLLFSRGSPAGMSVQPKNWLPGPCYRQQRVSKTKTDNNNSNFTWTGASKYNLNGRESIINPGTAMASHKDDEDKFFPMSGVMIFGKESAGASNTALDNVMITDEEEIKATNPVATERFGTVAVNFQSSSTDPATGDVHAMGALPGMVWQDRDVYLQGPIWAKIPHTDGHFHPSPLMGGFGLKNPPPQILIKNTPVPANPPAEFSATKFASFITQYSTGQVSVEIEWELQKENSKRWNPEVQYTSNYAKSANVDFTVDNNGLYTEPRPIGTRYLTRPL

SEQ ID NO: 752 - protein, 736 aa, Artificial Sequence
  Description of Artificial Sequence: Synthetic polypeptide
MAADGYLPDWLEDNLSEGIREWWDLKPGAPKPKANQQKQDDGRGLVLPGYKYLGPFNGLDKGEPVNAADAAALEHDKAYDQQLKAGDNPYLRYNHADAEFQERLQEDTSFGGNLGRAVFQAKKRVLEPLGLVEEGAKTAPGKKRPVEQSPQEPDSSSGIGKTGQQPAKKRLNFGQTGDSESVPDPQPLGEPPATPAAVGPTTMASGGGAPMADNNEGADGVGNASGNWHCDSTWLGDRVITTSTRTWALPTYNNHLYKQISSASTGASNDNHYFGYSTPWGYFDFNRFHCHFSPRDWQRLINNNWGFRPKRLNFKLFNIQVKEVTTNDGVTTIANNLTSTVQVFSDSEYQLPYVLGSAHQGCLPPFPADVFMIPQYGYLTLNNGSQAVGRSSFYCLEYFPSQMLRTGNNFTFSYTFEEVPFHSSYAHSQSLDRLMNPLIDQYLYYLNRTQNQSGSAQNKDLLFSRGSPAGMSVQPKNWLPGPCYRQQRVSKTKTDNNNSNFTWTGASKYNLNGRESIINPGTAMASHKDDEDKFFPMSGVMIFGKESAGASNTALDNVMITDEGEIKATNPVATERFGTVAVNFQSSSTDPATGDVHAMGALPGMVWQDRDVYLQGPIWAKIPHTDGHFHPSPLMGGFGLKNPPPQILIKNTPVPANPPAEFSATKFASFITQYSTGQVSVEIEWELQKENSKRWNPEVQYTSNYAKSANVDFTVDNNGLYTEPRPIGTRYLTRPL

SEQ ID NO: 753 - protein, 736 aa, Artificial Sequence
  Description of Artificial Sequence: Synthetic polypeptide
MAADGYLPDWLEDNLSEGIREWWDLKPGAPKPKANQQKQDDGRGLVLPGYKYLGPFNGLDKGEPVNAADAAALEHDKAYDQQLKAGDNPYLRYNHADAEFQERLQEDTSFGGNLGRAVFQAKKRVLEPFGLVEEGAKTAPGKKRPVEQSPQEPDSSSGIGKTGQQPAKKRLNFGQTGDSESVPDPQPLGEPPATPAAVGPTTMASGGGAPMADNNEGADGVGNASGNWHCDSTWLGDRVITTSTRTWALPTYNNHLYKQISSASTGASNDNHYFGYSTPWGYFDFNRFHCHFSPRDWQRLINNNWGFRPKRLNFKLFNIQVKEVTTNDGVTTIANNLTSTVQVFSDSEYQLPYVLGSAHQGCLPPFPADVFMIPQYGYLTLNNGSQAVGRSSFYCPEYFPSQMLRTGNNFTFSYTFEEVPFHSSYAHSQSLDRLMNPLIDQYLYYLNRTQNQSGSAQNKDLLFSRGSPAGMSVQPKNWLPGPCYRQQRVSKTKTDNNNSNFTWTGASKYNLNGRESIINPGTAMASHKDDKDKFFPMSGVMIFGKESAGASNTALDNVMITDEEEIKATNPVATERFGTVAVNFQSSNTDPATGDVHVMGALPGMVWQDRDVYLQGPIWAKIPHTDGHFHPSPLMGGFGLKHPPPQILIKNTPVPANPPAEFSATKFASFITQYSTGQVSVEIEWELQKENSKRWNPEVQYTSNYAKSANVDFTVDNNGLYTEPRPIGTRYLTRPL

SEQ ID NO: 754 - protein, 736 aa, Artificial Sequence
  Description of Artificial Sequence: Synthetic polypeptide
MAADGYLPDWLEDNLSEGIREWWDLKPGAPKPKANQQKQDDGRGLVLPGYKYLGPFNGLDKGEPVNAADAAALEHDKAYDQQLKAGDNPYLRYNHADAEFQERLQEDTSFGGNLGRAVFQAKKRVLEPFGLVEEGAKTAPGKKRPVEQSPQEPDSSSGIGKTGQQPAKKRLNFGQTGDSESVPDPQPLGEPPATPAAVGPTTMASGGGAPMADNNEGADGVGNASGNWHCDSTWLGDRVITTSTRTWALPTYNNHLYKQISSASTGASNDNHYFGYSTPWGYFDFNRFHCHFSPRDWQRLINNNWGFRPKRLNFKLFNIQVKEVTTNDGVTTIANNLTSTVQVFSDSEYQLPYVLGSAHQGCLPPFPADVFMIPQYGYLTLNNGSQAVGRSSFYCLEYFPSQMLRTGNNFTFSYTFEEVPFHSSYAHSQSLDRLMNPLIDQYLYYLNRTQNQSGSAQNKDLLFSRGSPAGMSVQPKNWLPGPCYRQQRVSKTKTDNNNSNFTWTGASKYNLNGRESIINPGTAMASHKDDKDKFFPMSGVMIFGKESAGASNTALDNVMITDEEEIKATNPVATERFGTVAVNFQSSDTDPATGDVHVMGALPGMVWQDRDVYLQGPIWAKIPHTDGHFHPSPLMGGFGLKHPPPQILIKNTPVPANPPAEFSATKFASFITQYSTGQVSVEIEWELQKENSKRWNPEVQYTSNYAKSANVDFTVDNNGLYTEPRPIGTRYLTRPL

SEQ ID NO: 755 - protein, 736 aa, Artificial Sequence
  Description of Artificial Sequence: Synthetic polypeptide
MAADGYLPDWLEDNLSEGIREWWDLKPGAPKPKANQQKQGDGRGLVLPGYKYLGPFNGLDKGEPVNAADAAALEHDKAYDQQLKAGDNPYLRYNHADAEFQERLQEDTSFGGNLGRAVFQAKKRVLEPFGLVEEGAKTAPGKKRPVEQSPQEPDSSSGIGKTGQQPAKKRLNFGQTGDSESVPDPQPLGEPPATPAAVGPTTMASGGGAPMADNNEGADGVGNASGNWHCDSTWLGDRVITTNTRTWALPTYNNHLYKQISSASTGASNDNHYFGYSTPWGYFDFNRFHCHFSPRDWQRLINNNWGFRPKRLNFKLFNIQVKEVTTNDGVTTIANNLTSTVQVFSDSEYQLPYVLGSAHQGCLPPFPADVFMIPQYGYLTLNNGSQAVGRSSFYCLEYFPSQMLRTGNNFTFSYTFEEVPFHSSYGHSQSLDRLMNLLIDQYLYYLNRTQNQSGSAQNKDLLFSRGSPAGMFVQPKNWLPGPCYRQQRVSKTKTDNNNSNFTWTGASKYNLNGRESIINPGTAMASHKDDEDKFFPMSGVMIFGKESAGASNTALDNVMITDEEEIKATNPVATERFGTVAVNFQSSSTDPATGDVHVMGALPGMVWQDRDVYLQGPIWAKIPHTDGHFHPSPLMGGFGLKHPPPQILIKNTPVPANPPAEFSATKFASFITQYSTGQVSVEIEWELQKENSKRWNPEVQYTSNYAKSANVDFTVDNNGLYTEPRPIGTRYLTRPL

SEQ ID NO: 756 - protein, 736 aa, Artificial Sequence
  Description of Artificial Sequence: Synthetic polypeptide
MAADGYLPDWLEDNLSEGIREWWDLKPGAPKPKANQQKQDDGRGLVLPGYKYLGPFNGLDKGEPVNAADAAALEHDKAYDQQLKAGDNPYLRYNHADAEFQERLQEDTSFGGNLGRAVFQAKKRVLEPFGLVEEGAKTAPGKKRPVEQSPQEPDSSSGIGKTGQQPAKKRLNFGQTGDSESVPDPQPLGEPPATPAAVGPTTMASGGGAPMADNNEGADGVGNASGNWHCDSTWLGDRVITTNTRTWALPTYNNHLYKQISSASTGASNDNHYFGYSTPWGYFDFNRFHCHFSPRDWQRLINNNWGFRPKRLNFKLFNIQVKEVTTNDGVTTIANNLTSTVQVFSDSEYQLPYVLGSAHQGCLPPFPADVFMIPQYGYLMLNNGSQAVGRSSFYCLEYFPSQMLRTGNNFTFSYTFEEVPFHSSYAHSQSLDRLMNPLIDQYLYYLNRTQNQSGSAQNKDLLFSRGSPAGMSVQPKNWLPGPCYRQQRVSKTKTDNNNSNFTWTGASKYNLNGRESIINPGTAMASHKDDEDKFFPMSGVMIFGKESAGASNTALDNVMITDEEEIKATNPAATERFGTVAVNFQSSSTDPATGDVHVMGALPGMVWQDRDVYLQGPIWAKIPHTDGHFHPSPLMGGFGLKHPPPQILIKNTPVPANPPAEFSATKFASFITQYSTGQVSVEIEWELQKENSKRWNPEVQYTSNYAKSANVDFTVDNNGLYTEPRPIGTRYLTRPL

SEQ ID NO: 757 - protein, 736 aa, Artificial Sequence
  Description of Artificial Sequence: Synthetic polypeptide
MAADGYLPDWLEDNLSEGIREWWDLKPGAPKPKANQQKQDDGRGLVLPGYKYLGPFNGLDKGEPVNAADAAALEHDKAYDQQLKAGDNPYLRYNHADAEFQERLQEDTSFGGNLGRAVFQAKKRVLEPFGLVEEGAKTAPGKKRPVEQSPQEPDSSSGIGKTGQQPAKKRLNFGQTGDSESVPDPQPLGEPPATPAAVGPTTMASGGGAPMADNNEGADGVGNASGNWHCDSTWLGDRVITTSTRTWALPTYNNHLYKQISSASTGASNDNHYFGYSTPWGYFDFNRFHCHFSPRDWQRLINNNWGFRPKRLNFKLFNIQVKEVTTNDGVTTIANNLTSTVQVFSDSEYQLPYVLGSAHQGCLPPFPADVFMIPQYGYLTLNNGSQAVGRSSFYCLEYFPSQMLRTGNNFTFSYTFEEVPFHSSYAHSQSLDRLMNPLIDQYLYYLNRTQNQSGSAQNKDLLFSRGSPAGMSVQPKNWLPGPCYRQQRVSKTKTDNNNSNFTWTGASKYNLNGRESIINPGTAMASHKDDEDKFFPMSGVMIFGKESAGASNTALDNVMITDEEEIKATNPVATERFGTVAVNFQSSSTDPATGDVHVMGALPGMVWQDRDVYLQGPIWAKIPHTDGHFHPSPLMGGFGLKHPPPQILIKNTPVPANPPAEFSATKFASFITQYSTGQVSVEIEWELQKENSKRWNPEVQYTSNYAKSANVDFTVDNNGLYTEPRPIGTRYLTRPL

SEQ ID NO: 758 - protein, 736 aa, Artificial Sequence
  Description of Artificial Sequence: Synthetic polypeptide
  MOD_RES (102)..(102): Xaa = any amino acid
MAADGYLPDWLEDNLSEGIREWWDLKPGAPKPKANQQKQDDGRGLVLPGYKYLGPFNGLDKGEPVNAADAAALEHDKAYDQQLKAGDNPYLRYNHADAEFQXRLQEDTSFGGNLGRAVFQAKKRVLEPFGLVEEGAKTAPGKKRPVEQSPQEPDSSSGIGKTGQQPAKKRLNFGQTGDSESVPDPQPLGEPPATPAAVGPTTMASGGGAPMADNNEGADGVGNASGNWHCDSTWLGGRVITTSTRTWALPTYNNHLYKQISSASTGASNDNHYFGHSTPWGYFDFNRFHCHFSPRDWQRLINNNWGFRPKRLNFKLFNIQVKEVTTNDGVTTIANNLTSTVQVFSDSEYQLPYVLGSAHQGCLPPSPADVFMIPQYGYLTLNNGSQAVGRSSFYCLEYFPSQMLRTGNNFTFSYTFEEVPFHSSYAHSQSLDRLMNPLIDQYLYYLNRTQNQSGSAQNKDLLFSRGSPAGMSVQPKNWLPGPCYRQQRVSKTKTDNNNSNFTWTGASKYNLNGRESIINPGTAMASHKDDKDKFFPMSGVMIFGKESAGASNTALDNVMITDEEEIKATNPVATERFGTVAVNFQSSNTDPATGDVHVMGALPGMVWQDRDVYLQGPIWAKIPHTDGHFHPSPLMGGFGLKHPPPQILIKNTPVPANPPAEFSATKFASFITQYSTGQVSVEIEWELQKENSKRWNPEVQYTSNYAKSANVDFTVDNNGLYTEPRPIGTRYLTRPL

SEQ ID NO: 759 - protein, 736 aa, Artificial Sequence
  Description of Artificial Sequence: Synthetic polypeptide
MAADGYFPDWLEDNLSEGIREWWDLKPGAPKPKANQQKQDDGRGLVLPGYKYLGPFNGLDKGEPVNAADAAALEHDKAYDQQLKAGDNPYLRYNHADAEFQERLQEDTSFGGNLGRAVFQAKKRVLEPFGLVEEGAKTAPGKKRPVEQSPQEPDSSSGIGRTGQQPAKKRLNFGQTGDSESVPDPQPLGEPPATPAAVGPTTMASGGGAPMADNNEGADGVGNASGNWHCDSTWLGDRVITTSTRTWALPTYNNHLYKQISSASTGASNDNHYFGYSTPWGYFDFNRFHCHFSPRDWQRLINNNWGFRPKRLNFKLFNIQVKEVTTNDGVTTIANNLTSTVQVFSDSEYQLPYVLGSAHQGCLPPFPADVFMIPQYGYLTLNNGSQAVGRSSFYCLEYFPSQMLRTGNNFTFSYTFEEVPFHSSYAHSQSLDRLMNPLIDQYLYYLNRTQNQSGSAQNKDLLFSRGSPAGMSVQPKNWLPGPCYRQQRVSKTKTDNNNSNFTWTGASKYNLNGRESIINPGTAMASHKDDEDKFFPMSGVMIFGKESAGASNTALDNVMITDEEEIKATNPVATERFGTVAVNFQSSSPDPATGDVHVMGALPGMVWQDRDVYLQGPIWAKIPHTDGHFHPSPLMGGFGLKHPPPQILIKNTPVPANPPAEFSATKFASFITQYSTGQVSVEIEWELQKENSKRWNPEVQYTSNYAKSANVDFTVDNNGLYSEPRPIGTRYLTRPL

SEQ ID NO: 760 - protein, 736 aa, Artificial Sequence
  Description of Artificial Sequence: Synthetic polypeptide
MAADGYLPDWLEDNLSEGIREWWDLKPGAPKPKANQQKQDDGRGLVLPGYKYLGPFNGLDKGEPVNAADAAALEHDKAYDQQLKAGDNPYLRYNHADAEFQERLQEDTSFGGNLGRAVFQAKKRVLEPFGLVEEGAKTAPGKKRPVEQSPQEPDSSSGIGKTGQQPAKKRLNFGQTGDSESVPDPQPLGEPPATPAAVGPTTMASGGGAPMADNNEGADGVGNASGNWHCDSTWLGDRVITTSTRTWALPTYNNHLYKQTSSASTGASNDNHYFGYSTPWGYFDFNRFHCHFSPRDWQRLINNNWGFRPKRLNFKLFNIQVKEVTTNDGVTTIANNLTSTVQVFSDSEYQLPYVLGSAHQGCLPPFPADVFMIPQYGYLTLNNGSQAVGRSSFYCLEYFPSQMLRTGNNFTFSYTFEEVPFHSSYAHSQSLDRLMNPLIDQYLYYLNRTQNQSGSAQNKDLLFSRGSPAGMSVQPKNWLPGPCYRQQRVSKTKTDYNNSNFTWTGASKYNLNGRESIINPGTAMASHKDDEDKFFPMSGVMIFGKESAGASNTALDNVMITDEEEIKATNPVATERFGTVAVNFQSSSTDPATGDVHVMGALPGMVWQDRDVYLQGPIWAKIPHTDGHFHPSPLMGGFGLKHPPPQILIKNTPVPANPPAEFSATKFASFITQYSTGQVSVEIEWELQKENSKRWNPEVQYTSNYAKSANVDFTVDNNGLYTEPRPIGTRYLTRPL

SEQ ID NO: 761 - protein, 736 aa, Artificial Sequence
  Description of Artificial Sequence: Synthetic polypeptide
MAADGYPPDWLEDNLSEGIREWWDLKPGVPKPKANQQKQDDGRGLVLPGYKYLGPFNGLDKGEPVNAADAAALEHDKAYDQQLKAGDNPYLRYNHADAEFQERLQEDTSFGGNLGRAVFQAKKRVLEPFGLVEEGAKTAPGKKRPVEQSPQEPDSSSGIGKTGQQPAKKRLNFGQTGDSESVPDPQPLGEPPATPAAVGPTTMASGGGAPMADNNEGADGVGNASGNWHCDSTWLGDRVITTSTRTWALPTYNNHLYKQISSASTGASNDNHYFGYSTPWGYFDFNRFHCHFSPRDWQRLINNNWGFRPKRLNFKLFNIQVKEVTTNDGVTTIANNLTSTVQVFSDSEYQLPYVLGSAHQGCLPPFPADVFMIPQYGYLTLNNGSQAVGRSSFYCLEYFPSQMLRTGNNFTFSYTFEEVPFHSSYAHSQSLDRLMNPLIDQYLYYLNRTQNQSGSAQNKDLLFSRGSPAGMSVQPKNWLPGPCYRQQRVSKTKTDNNNSNFTWTGASKYNLNGRESIINPGTAMASHKDDEDKFFPMSGVMIFGKESAGASNTALDNVMITDEEEIKATNPVATERFGTVAVNFQSSSTDPATGDVHVMGALPGMVWQDRDVYLQGPIWAKIPHTDGHFHPSPLMGGFGLKHPPPQILIKNTPVPANPPAEFSATKFASFITQYSTGQVSVEIEWELQKENSKRWNPEVQYTSNYAKSANVDFTVDNNGLYTEPRPIGTRYLTRPL

SEQ ID NO: 762 - protein, 732 aa, Artificial Sequence
  Description of Artificial Sequence: Synthetic polypeptide
MAADGYLPDWLEDNLSEGIREWWDLKPGAPKPKANQQKQDDGRGLVLPGYKYLGPFNGLDKGEPVNAADAAALEHDKAYDQQLKAGDNPYLRYNHADAEFQERLQEDTSFGGNLGRAVFQAKKRVLEPFGLVEEGAKTAPGKKRPVEQSPQEPDSSSGIGKTGQQPAKKRLNFGQTGDSESVPDPQPLGEPPATPAAVGPTTMASGGGAPMADNNEGADGVGNASGNWHCDSTWLGDRVITTSTRTWALPTYNNHLYKQISSASTGASNDNHYFGYSTPWGYFDFNRFHCHFSPRDWQRLINNNWGFRPKRLNFKLFNIQVKEVTTNDGVTTIANNLTSTVQAFSDSEYQLPYVLGSAHQGCLPPFPADVFMIPQYGYLTLNNGSQAVGRSSFYCLEYFPSQMLRTGNNFTFSYTFEEVPFHSSYAHSQSLDRLMNPLIDPYLYYLNRTQNQSGSAQNKDLLFSRGSPAGMSVQPKNWLPGPCYRQQRVSKTKTDNNNSNFTWTGASKYNLNGRESIINPGTAMASHKDDEDKFFPMSGVMIFGKESAGASNTALDNVMITDEEEIKATNPVATERFGTVAVNFQSSSTDPATGDVHVMGALPGMVWQDRDVYLQGPIWAKIPHTDGHFHPSPLMGGFGLKHPPPQILIKNTPVPANPPAEFSATKFASFITQYSTGQVSVEIEWELQKENSKRWNPEVQYTSNYAKSANVDFTVDNNGLYTEPRPIGTRYL

SEQ ID NO: 763 - protein, 736 aa, Artificial Sequence
  Description of Artificial Sequence: Synthetic polypeptide
MAADGYLPDWLEDNLSEGIREWWDLKPGAPKPKANQQKQDDGRGLVLPGYKYLGPFNGLDKGEPVNAADAAALEHDKAYDQQLKAGDNPYLRYNHADAEFQERLQEDTSFGGNLGRAVFQAKKRVLEPFGLVEEGAKTAPGKKRPVEQSPQEPDSSSGIGKTGQQPAKKRLNFGQTGDSESVPDPQPLGEPPATPAAVGPTTMASGGGAPMADNNEGADGVGNASGNWHCDSTWLGDRVITTSTRTWALPTYNNHLYKQISSASTGASNDNHYFGYSTPWGYFDFNRFHCHFSPRDWQRLINNNWGFRPKRLNFKLFNIQVKEVTTNDGVTTIANNLTSTVQVFSDSEYQLPYVLGSAHQGCLPPFPADVFMIPQYGYLTLNNGSQAVGRSSFYCLEYFPSQMLRTGNNFTFSYTFEEVPFHSSYAHSQSLDRLMNPLIDQYLYYLNRTQNQSGSAQNKDLLFSRGSPAGMSVQPKNWLPGPCYRQQRVSKTKTDNNNSNFTWTGASKYNLNGRESIINPGTAMASHKDDEDKFFPMSGVMIFGKESAGASNTALDNVMITDEEEIKATNPVATERFGTVAVNFQSSSTDPATGDVHVMGALPGMVWQDRDVYLQGPIWAKIPHTDGHSHPSPLMGGFGLKHPPPQILIKNTPVPANPPAEFSATKFASFITQYSTGQVSVEIEWELQKENSKRWNPEVQYTSNYAKSANVDFTVDNNGLYTEPRPIGTRYLTRPL

SEQ ID NO: 764 - protein, 736 aa, Artificial Sequence
  Description of Artificial Sequence: Synthetic polypeptide
MAADGYLPDWLEDNLSEGIREWWDLKPGAPKPKANQQKQDDGRGLVLPGYKYLGPFNGLDKGEPVNAADAAALEHDKAYDQQLKAGDNPYLRYNHADAEFQERLQEDTSFGGNLGRAVFQAKKRVLEPFGLVEEGAKTAPGKKRPVEQSPQEPDSSSGIGKTGQQPAKKRLNFGQTGDSESVPDPQPLGEPPATPAAVGPTTMASGGGAPMADNNEGADGVGNASGNWHCDSTWLGDRVITTSTRTWALPTYNNHLYKQISSASTGASNDNHYFGYSTPWGYFDFNRFHCHFSPRDWQRLINNNWGFRPKRLNFKLFNIQVKEVTTNDGVTTIANNLTSTVQVFSDSEYQLPYVLGSAHQGCLPPFPADVFMIPQYGYLTLNNGSQAVGRSSFYCLEYFPSQMLRTGNNFTFSYTFEEVPFHSSYAHSQSLDRLMNPLIDLYLYYLNRTQNQSGSAQNKDLLFSRGSPAGMSVQPKNWLPGPCYRQQRVSKTKTDNNNSNFTWTGASKYNLNGRESIINPGTAMASHKDDEDKFFPMSGVMIFGKESAGTSNTALDNVMITDEEEIKATNPVATERFGTVAVNFQSSSTDPATGDVHVMGALPGMVWQDRDVYLQGPIWAKIPHTDGHFHPSPLMGGFGLKHPPPQILIKNTPVPANPPAEFSATKFASFITQYSTGQVSVEIEWELQKENSKRWNPEVQYTSNYAKSANVDFTVDNNGLYTEPRPIGTRYLTRPL

SEQ ID NO: 765 - protein, 736 aa, Artificial Sequence
  Description of Artificial Sequence: Synthetic polypeptide
MAADGYLPDWLEDSLSEGIREWWDLKPGAPKPKANQQKQDDGRGLVLPGYKYLGPFNGLDKGEPVNAADAAALEHDKAYDQQLKAGDNPYLRYNHADAEFQERLQEDTSFGGNLGRAVFQAKKRVLEPFGLVEEGAKTAPGKKRPVEQSPQEPDSSSGIGKTGQQPAKKRLNFGQTGDSESVPDPQPLGEPPATPAAVGPTTMASGGGAPMADNNEGADGVGNASGNWHCDSTWLGDRVITTSTRTWALPTYNNHLYKQISSASTGASNDNHYFGYSTPWGYFDFNRFHCHFSPRDWQRLINNNWGFRPKRLNFKLFNIQVKEVTTNDGVTTIANNLTSTVQVFSDSEYQLPYVLGSAHQGCLPPFPADVFMIPQYGYLTPNNGSQAVGRSSFYCLEYFPSQMLRTGNNFTFSYTFEEVPFHSSYAHSQSLDRLMNPLIDQYQYYLNRTQNQSGSAQNKDLLFSRGSPAGMSVQPKNWLPGPCYRQQRVSKTKTDNNNSNFTWTGASKYNLNGRESIINPGTAMASHKDDEDKFFPMSGVMIFGKESAGASNTALDNVMITDEEEIKATNPVATERFGTVAVNFQSSSTDPATGDVHVMGALPGMVWQDRDVYLQGPIWAKIPHTDGHFHPSPLMGGFGLKHPPPQILIKNTPVPANPPAEFSATKFASFITQYSTGQVSVEIEWELQKENSKRWNPEVQYTSNYAKSANVDFTVDNNGLYTEPRPIGTRYLTRPL

SEQ ID NO: 766 - protein, 736 aa, Artificial Sequence; identical to SEQ ID NO: 757
  Description of Artificial Sequence: Synthetic polypeptide

SEQ ID NO: 767 - protein, 735 aa, Artificial Sequence
  Description of Artificial Sequence: Synthetic polypeptide
MAADGYLPDWLEDTLSEGIRQWWKLKPGPPPPKPAERHKDDSRGLVLPGYKYLGPFNGLDKGEPVNEADAAALEHDKAYDRQLDSGDNPYLKYNHADAEFQERLKEDTSFGGNLGRAVFQAKKRVLEPLGLVEEPVKTAPGKKRPVEHSPVEPDSSSGTGKAGQQPARKRLNFGQTGDADSVPDPQPLGQPPAAPSGLGTNTMATGSGAPMADNNEGADGVGNSSGNWHCDSTWMGDRVITTSTRTWALPTYNNHLYKQISSQSGASNDNHYFGYSTPWGYFDFNRFHCHFSPRDWQRLINNNWGFRPKRLNFKLFNIQVKEVTQNDGTTTIANNLTSTVQVFTDSEYQLPYVLGSAHQGCLPPFPADVFMVPQYGYLTLNNGSQAVGRSSFYCLEYFPSQMLRTGNNFTFSYTFEDVPFHSSYAHSQSLDRLMNPLIDQYLYYLSRTNTPSGTTTQSRLQFSRAGASDIRDQSRNWLPGPCYRQQRVSKTSADNNNSEYSWTGATKYHLNGRDSLVNPGPAMASHKDDEEKFFPQSGVLIFGKQGSEKTNVDIEKVMITDEEEIRTTNPVATEQYGSVSTNLQRGNRQAATADVNTQGVLPGMVWQDRDVYLQGPIWAKIPHTDGHFHPSPLMGGFGLKHPPPQILIKNTPVPANPSTTFSAAKFASFITQYSTGQVSVEIEWELQKENSKRWNPEIQYTSNYNKSVNVDFTVDTNGVYSEPRPIGTRYLTRNL

SEQ ID NO: 768 - DNA, 2211 bp, Artificial Sequence
  Description of Artificial Sequence: Synthetic polynucleotide
atggctgctgacggttatcttccagattggctcgaggacaacctttctgaaggcattcgtgagtggtgggctctgaaacctggagtccctcaacccaaagcgaaccaacaacaccaggacaaccgtcggggtcttgtgcttccgggttacaaatacctcggacccggtaacggactcgacaaaggagagccggtcaacgaggcggacgcggcagccctcgaacacgacaaagcttacgaccagcagctcaaggccggtgacaacccgtacctcaagtacaaccacgccgacgccgagtttcaggagcgtcttcaagaagatacgtcttttgggggcaaccttggcagagcagtcttccaggccaaaaagaggatccttgagcctcttggtctggttgaggaagcagctaaaacggctcctggaaagaagaggcctgtagatcagtctcctcaggaaccggactcatcatctggtgttggcaaatcgggcaaacagcctgccagaaaaagactaaatttcggtcagactggcgactcagagtcagtcccagaccctcaacctctcggagaaccaccagcagcccccacaagtttgggatctaatacaatggcttcaggcggtggcgcaccaatggcagacaataacgagggtgccgatggagtgggtaattcctcaggaaattggcattgcgattcccaatggctgggcgacagagtcatcaccaccagcaccagaacctgggccctgcccacttacaacaaccatctctacaagcaaatctccagccaatcaggagcttcaaacgacaaccactactttggctacagcaccccttgggggtattttgactttaacagattccactgccacttctcaccacgtgactggcagcgactcattaacaacaactggggattccggcccaagaaactcagcttcaagctcttcaacatccaagttaaagaggtcacgcagaacgatggcacgacgactattgccaataaccttaccagcacggttcaagtgtttacggactcggagtatcagctcccgtacgtgctcgggtcggcgcaccaaggctgcctcccgccgtttccagcggacgtcttcatggtccctcagtatggatacctcaccctgaacaacggaagtcaagcggtgggacgctcatccttttactgcccggagtacttcccttcgcagatgctaaggactggaaataacttccaattcagctataccttcgaggatgtaccttttcacagcagctacgctcacagccagagtttggatcgcttgatgaatcctcttattgatcagtatctgtactacctgaacagaacgcaaggaacaacctctggaacaaccaaccaatcacggctgctttttagccaggctgggcctcagtctatgtctttgcaggccagaaattggctacctgggccctgctaccggcaacagagactttcaaagactgctaacgacaacaacaacagtaactttccttggacagcggccagcaaatatcatctcaatggccgcgactcgctggtgaatccaggaccagctatggccagtcacaaggacgatgaagaaaaatttttccctatgcacggcaatctaatatttggcaaagaagggacaacggcaagtaacgcagaattagataatgtaatgattacggatgaagaagagattcgtaccaccaatcctgtggcaacagagcagtatggaactgtggcaaataacttgcagagctcaaatacagctcccacgactagaactgtcaatgatcagggggccttacctggcatggtgtggcaagatcgtgacgtgtaccttcaaggacctatctgggcaaagattcctcacacggatggacactttcatccttctcctctgatgggaggctttggactgaaacatccgcctcctcaaatcatgatcaaaaatactccggtaccggcaaatcctccgacgactttcagcccggccaagtttgcttcatttatcactcagtactccactggacaggtcagcgtggaaattgagtgggagctacagaaagaaaacagcaaacgttggaatccagagattcagtacacttccaactacaacaagtctgttaatgtggactttactgtagacactaatggtgtttatagtgaacctcaccctattggaacccggtatctcacacgaaacttgtaa

SEQ ID NO: 769 - DNA, 2211 bp, Artificial Sequence
  Description of Artificial Sequence: Synthetic polynucleotide
atggctgctgatggttatcttccagattggctcgaggacaacctttctgaaggcattcgtgagtggtgggctctgaaacctggagtccctcaacccaaagcgaaccaacaacaccaggacaaccgtcggggtcttgtgcttccgggttacaaatacctcggacccggtaacggactcgacaaaggagagccggtcaacgaggcggacgcggcagccctcgaacacgacaaagcttacgaccagcagctcaaggccggtgacaacccgtacctcaagtacaaccacgccgacgccgagtttcaggagcgtcttcaagaagatacgtcttttgggggcaaccttggcagagcagtcttccaggccaaaaagaggatccttgagcctcttggtctggttgaggaagcagctaaaacggctcctggaaagaagaggcctgtagatcagtctcctcaggaaccggactcatcatctggtgttggcaaatcgggcaaacagcctgccagaaaaagactaaatttcggtcagactggcgactcagagtcagtcccagaccctcaacctctcggagaaccaccagcagcccccacaagtttgggatctaatacaatggcttcaggcggtggcgcaccaatggcagacaataacgagggtgccgatggagtgggtaattcctcaggaaattggcattgcgattcccaatggctgggcgacagagtcatcaccaccagcaccagaacctgggccctgcccacttacaacaaccatctctacaagcaaatctccagccaatcaggagcttcaaacgacaaccactactttggctacagcaccccttgggggtattttgactttaacagattccactgccacttctcaccacgtgactggcagcgactcattaacaacaactggggattccggcccaagaaactcagcttcaagctcttcaacatccaagttaaagaggtcacgcagaacgatggcacgacgactgttgccaataaccttaccagcacggttcaagtgtttacggactcggagtatcaactcccgtacgtgctcgggtcggcgcaccaaggctgtctcccgccgtttccagcggacgtcttcatggtccctcagtatggatacctcaccctgaacaacggaagtcaagcggtgggacgctcatccttttactgcctggagtacttcccttcgcagatgctaaggactggaaataacttccaattcagctataccttcgaggatgtaccttttcacagcagctacgctcacagccagagtttggatcgcttgatgaatcctcttattgatcagtatctgtactacctgaacagaacgcaaggaacaacctctggaacaaccaaccaatcacggctgctttttagccaggctgggcctcagtctatgtctttgcaggccagaaattggctacctgggccctgctaccggcaacagagactttcaaagactgctaacgacaacaacaacagtaactttccttggacagcggccagcaaatatcatctcaatggccgcgactcgctggtgaatccaggaccagctatggccagtcacaaggacgatgaagaaaaatttttccctatgcacggcaatctaatatttggcaaagaagggacaacggcaagtaacgcagaattagataatgtaatgattacggatgaagaagagattcgtaccaccaatcctgtggcaacagagcagtatggaactgtggcaaataacttgcagagctcaaatacagctcccacgactagaactgtcaatgatcagggggccttacctggcatggtgtggcaagatcgtgacgtgtaccttcaaggacctatctgggcaaagattcctcacacggatggacactttcatccttctcctctgatgggaggctttggactgaaacatccgcctcctcaaatcatgatcaaaaatactccggtaccggcaaatcctccgacgactttcagcccggccaagtttgcttcatttatcactcagtactccactggacaggtcagcgtggaaattgagtgggagctacagaaagaaaacagcaaacgttggaatccagagattcagtacacttccaactacaacaagtctgttaatgtggactttactgtagacactaatggtgtttatagtgaacctcgccctattggaacccggtatctcacacgaaacttgtaa

SEQ ID NO: 770 - DNA, 2211 bp, Artificial Sequence
  Description of Artificial Sequence: Synthetic polynucleotide
atggctgctgacggttatcttccagattggctcgaggacaacctttctgaaggcattcgtgagtggtgggctctgaaacctggagtccctcaacccaaagcgaaccaacaacaccaggacaaccgtcggggtcttgtgcttccgggttacaaatacctcggacccggtaacggactcgacaaaggagagccggtcaacgaggcggacgcggcagccctcgaacacgacaaagcttacgaccagcagctcaaggccggtgacaacccgtacctcaagtacaaccacgccgacgccgagtttcaggagcgtcttcaagaagatacgtcttttgggggcaaccttggcagagcagtcttccaggccaaaaagaggatccttgagcctcttggtctggttgaggaagcagctaaaacggctcctggaaagaagaggcctgtagatcagtctcctcaggaaccggactcatcatctggtgttggcaaatcgggcaaacagcctgccagaaaaagactaaatttcggtcagactggcgactcagagtcagtcccagaccctcaacctctcggagaaccaccagcagcccccacaagtttgggatctaatacaatggcttcaggcggtggcgcaccaatggcagacaataacgagggtgccgatggagtgggtaattcctcaggaaattggcattgcgattcccaatggctgggcgacagagtcatcaccaccagcaccagaacctgggccctgcccacttacaacaaccatctctacaagcaaatctccggccaatcaggagcttcaaacgacaaccactactttggctacagcaccccttgggggtattttgactttaacagattccactgccacttctcaccacgtgactggcagcgactcattaacaacaactggggattccggcccaagaaactcagcttcaagctcttcaacatccaagttaaagaggtcacgcagaacgatggcacgacgactattgccaataaccttaccagcacggttcaagtgtttacggactcggagtatcagctcccgtacgtgctcgggtcggcgcaccaaggctgtctcccgccgtttccagcggacgtcttcatggtccctcagtatggatacctcaccctgaacaacggaagtcaagcggtgggacgctcatccttttactgcctggagtacttcccttcgcagatgctaaggactggaaataacttccaattcagctataccttcgaggatgtaccttttcacagcagctacgctcacagccagagtttggatcgcttgatgaatcctcttattgatcagtatctgtactacctgaacagaacgcaaggaacaacctctggaacaaccaaccaatcacggctgctttttagccaggctgggcctcagtctatgtctttgcaggccagaaattggctacctgggccctgctaccggcaacagagactttcaaagactgctaacggcaacaacaacagtaactttccttggacagcggccagcaaatatcatctcaatggccgcgactcgctggtgaatccaggaccagctatggccagtcacaaggacgatgaagaaaaatttttccctatgcacggcaatctaatatttggcaaagaagggacaacggcaagtaacgcagaattagataatgtaatgattacggatgaagaagagattcgtaccaccaatcctgtggcaacagagcagtgtggaactgtggcaaataacttgcagagctcaaatacagctcccacgactagaactgtcaatgatcagggggccttacctggcatggtgtggcaagatcgtgacgtgtaccttcaaggacctatctgggcaaagattcctcacacggatggacactttcatccttctcctctgatgggaggctttggactgaaacatccgcctcctcaaatcatgatcaaaaatactccggtaccggcaaatcctccgacgactttcagcccggccaagtttgcttcatttatcactcagtactccactggacaggtcagcgtggaaattgagtgggagctacagaaagaaaacagcaaacgttggaatccagagattcagtacacttccaactacaacaagtctgttaatgtggactttactgtagacactaatggtgtttatagtgaacctcgccctattggaacccggtatctcacacgaaacttgtaa

SEQ ID NO: 771 - DNA, 2212 bp, Artificial Sequence
  Description of Artificial Sequence: Synthetic polynucleotide
  misc_feature (1283)..(1283): n is a, c, t, or g
atggctgctgacggttatcttccagattggctcgaggacaacctttctgaaggcattcgtgagtggtgggctctgaaacctggagtccctcaacccaaagcgaaccaacaacaccaggacaaccgtcggggtcttgtgcttccgggttacaaatacctcggaccgggtaacggactcgacaaaggagagccggtcaacgaggcggacgcggcagccctcgaacacgacaaagcttacgaccagcagctcaaggccggtgacaacccgtacctcaagtacaaccacgccgacgccgagtttcaggagcgtcttcaagaagatacgtcttttgggggcaaccttggcagagcagtcttccaggccaaaaagaggatccttgagcctcttggtctggttgagggagcagctaaaacggctcctggaaagaagaggcctgtagatcagtctcctcaggaaccggactcatcatctggtgttggcaaatcgggcaaacagcctgccagaaaaagactaaatttcggtcagactggcgactcagagtcagtcccagaccctcaacctctcggagaaccaccagcagcccccacaagtttgggatctaatacaatggcttcaggcggtggcgcaccaatggcagacaataacgagggtgccgatggagtgggtaattcctcaggaaattggcattgcgattcccaatggctgggcgacagagtcatcaccaccagcaccagaacctgggccctgcccacttacaacagccatctctacaagcaaatctccagccaatcaggagcttcaaacgacaaccactactttggctacagcaccccttgggggtattttgactttaacagattccactgccacttctcaccacgtgactggcagcgactcattaacaacaactggggattccggcccaagaaactcagcttcaagctcttcaacatccaagttaaagaggtcacgcagaacgatggcacgacgactattgccaataaccttaccagcacggtccaagtgtttacggactcggagtatcagctcccgtacgtgctcgggtcggcgcaccaaggctgtctcccgccgtttccagcggacgccttcatggtccctcagtatggatacctcaccctgaacaacggaagtcaagcggtgggacgctcatccttttactgcctggagtacttcccttcgcagatgctaaggactggaaataacttccaattcagctataccttcgaggatgtaccttttcacggcagctacgctcacagccngagtttggatcgcttgatgaatcctcttattgatcagtatctgtactacctgaacagaacgcaaggaacaacctctggaacaaccaaccaatcacggctgctttttagccaggctgggcctcagtctatgtctttgcaggccagaaattggctacctgggccctgctaccggcaacagagacttttcaaagactgctaacgacaacaacaacagtaactttccttggacagcggccagcaaatatcatctcaatggccgcgactcgctggtgaatccaggaccagctatggccagtcacaaggacgatgaagaaaaatttttccctatgcacggcaatctaatatttggcaaagaagggacaacggcaagtaacgcagaattagataatgtaatgattacggatgaagaagagattcgtaccaccaatcctgtggcaacagagcagtatggaactgtggcaaataacttgcagagctcaaatacagctcccacgactagaactgtcaatgatcagggggccttacctggcatggtgtggcaagatcgtgacgtgtaccttcaaggacctatctgggcaaagattcctcacacggatggacactttcatccttctcctctgatgggaggctttggactgaaacatccgcctcctcaaatcatgatcaaaaatactccggtaccggcaaatcctccgacgactttcagcccggccaagtttgcttcatttatcactcagtactccactggacaggtcagcgtggaaattgagtgggagctacagaaagaaaacagcaaacgttggaatccagagattcagtacacttccaactacaacaagtctgttaatgtggactttactgtagacactaatggtgtttatagtgaacctcgccctattggaacccggtatctcacacgaaactcgtaa

SEQ ID NO: 772 - DNA, 2212 bp, Artificial Sequence
  Description of Artificial Sequence: Synthetic polynucleotide
atggctgctgacggttatcttccagattggctcgaggacaacctttctgaaggcattcgtgagtggtgggctctgaaacctggagtccctcaacccaaagcgaaccaacaacaccaggacaaccgtcggggtcttgtgcttccgggttacaaatacctcggacccggtaacggactcgacaaaggagagccggtcaacgaggcggacgcggcagccctcgaacacgacaaagcttacgaccagcagctcaaggccggtgacaacccgtacctcaagtacaaccacgccgacgccgagtttcaggagcgtcttcaagaagatacgtcttttgggggcaaccttggcagagcagtcttccaggccaaaaagaggatccttgagcctcttggtctggttgagggagcagctaaaacggctcctggaaagaagaggcctgtagatcagtctcctcaggaaccggactcatcatctggtgttggcaaatcgggcaaacagcttgccagaaaaagactaaatttcggtcagactggcgactcagagtcagtcccagaccctcaacctctcggagaaccaccagcagcccccacaagtttgggatctaatacaatggcttcaggcggtggcgcaccaatggcagacaataacgagggtgccgatggagtgggtaattcctcaggaaattggcattgcgattcccaatggctgggcgacagagtcatcaccaccagcaccagaacctgggccctgcccacttacaacagccatctctacaagcaaatctccggccaatcaggagcttcaaacgacaaccactactttggctacagcaccccctgggggtattttgactttaacagattccactgccacttctcaccacgtgactggcagcgactcattaacaacaactggggattccggcccaagaaactcagcttcaagctcttcaacatccaagttaaagaggtcacgcagaacgatggcacgacgactattgccaataaccttaccagcacggttcaagtgtttacggactcggagtatcagctcccgtacgtgctcgggtcggcgcaccaaggctgtctcccgccgtttccagcggacgtcttcatggtccctcagtatggatacctcaccctgaacaacggaagtcaagcggtgggacgctcatccttttactgcctggagtacttcccttcgcagatgctaaggactggaaataacttccaattcagctataccttcgaggatgtaccttttcacagcagctacgctcacagccagagtttggatcgcttgatgaatcctcttattgatcagtatctgtactacctgaacagaacgcaaggaacaacctctggaacaaccaaccaatcacggctgctttttagccaggctgggcctcagtctatgtctttgcaggccagaaattggctacctgggccctgctaccggcaacagagactttcaaagactgctaacgacaacaacaacagtaactttccttggacagcggccagcaaatatcatctcaatggccgcgactcgctggtgaatcccaggaccagctatggccagtcacaaggacgatgaagaaaaatttttccctatgcacggcaatctaatatttggcaaagaagggacaacggcaagtaacgcagaattagataatgtaatgattacggatgaagaagagattcgtaccaccaatcctgtggcaacagagcagtatggaactgtggcaaataacttgcagagctcaaatacagctcccacgactagaactgtcaatgatcagggggccttacctggcatggtgtggcaagatcgtgacgtgtaccttcaaggacctatctgggcaaagattcctcacacggatggacactttcatccttctcctctgatgggaggctttggactgaaacatccgcctcctcaaatcatgatcaaaaatactccggtaccggcaaatcctccgacgactttcagcccggccaagtttgcttcatttatcactcagtactccactggacaggtcagcgtggaaattgagtgggagctacagaaagaaaacagcaaacgttggaatccagagattcagtacacttccaactacaacaagtctgttaatgtggactttactgtagacactaatggtgtttatagtgaacctcgccctattggaacccggtatctcacacgaaacttgtaa

SEQ ID NO: 773 - DNA, 2212 bp, Artificial Sequence
  Description of Artificial Sequence: Synthetic polynucleotide
atggctgctgacggttatcttccagattggctcgaggacaacctttctgaaggcattcgtgagtggtgggctctgaaacctggagtccctcaacccaaagcgaaccaacaacaccaggacgaccgtcggggtcttgtgcttccgggttacaaatacctcggacccggtaacggactcgacaaaggagagccggtcaacgaggcggacgcggcagccctcgaacacgacaaagcttacgaccagcagctcaaggccggtgacaacccgtgcctcaagtacaaccacgccgacgccgagtttcaggagcgtcttcaagaagatacgtcttttgggggcaaccttggcagagcagtcttccaggccaaaaagaggatccttgagcctcttggtctggttgaggaagcagctaaaacggctcctggaaagaagaggcctgtagatcagtctcctcaggaaccggactcatcatctggtgttggcaaatcgggcaaacagcctgccagaaaaagactaaatttcggtcagactggcgactcagagtcagtcccagaccctcaacctctcggagaaccaccagcagcccccacaagtttgggatctaatacaatggcttcaggcggtagcgcaccaatggcagacaataacgagggtgccgatggagtgggtaattcctcaggaaattggcattgcgattcccaatggctgggcgacagagtcatcaccaccagcaccagaacctgggccctgcccacttacaacaaccatctctacaagcaaatctccagccaatcaggagcttcaaacgacaaccactactttggctacagcaccccttgggggtattttgactttaacagattccactgccacttctcaccacgtgactggcagcgactcattaacaacaactggggattccggcccaagaaactcagcttcaagctcttcaacatccaagttaaagaggtcacgcagaacgatggcacgacgactattgccaataaccttaccagcacggttcaagtgtttacggactcggagtatcagctcccgtacgtgctcgggtcggcgcaccaaggctgtctcccgccgtttccagcggacgtcttcatggtccctcagtatggatacctcaccctgaacaacggaagtcaagcggtgggacgctcatccttttactgcctggagtacttcccttcgcagatgctaaggactggaaataacttccaattcagctataccttcgaggatgtaccttttcacagcagctacgctcacagccagagtttggatcgcttgatggatcctcttattgatcagtatctgtactacctgaacagaacgcaaggaacaacctctggaacaaccaaccaatcacggctgctttttagccaggctgggcctcagtctatgtctttgcaggccagaaattggctacctgggccctgctaccggcaacagagactttcaaagactgctaacgacaacaacaacagtaactttccttggacagcggccagcaaatatcatctcaatggccgcgactcgctggtgaatccaggaccagctatggccagtcacaaaggacgatgaagaaaaatttttccctatgcacggcaatctaatatttggcaaagaagggacaacggcaagtaacgcagaattagataatgtaatgattacggatgaagaagagattcgtaccaccaatcctgtggcaacagagcagtatggaactgtggcaaataacttgcagagctcaaatacagctcccacgactagaactgtcaatgatcagggggccttacctggcatggtgtggcaagatcgtgacgtgtaccttcaaggacctatctgggcaaagattcctcacacggatggacactttcatccttctcctctgatgggaggctttggactgaaacatccgcctcctcaaatcatgatcaaaaatactccggtaccggcaaatcctccgacgactttcagcccggccaagtttgcttcatttatcactcagtactccactggacaggtcagcgtggaaattgagtgggagctacagaaagaaaacagcaaacgttggaatccagagattcagtacacttccaactacaacaagtctgttaatgtggactttactgtagacactaatggtgtttatagtgaacctcgccctattggaacccggtatctcacacgaaacctgtaa

SEQ ID NO: 774 - DNA, 2211 bp, Artificial Sequence
  Description of Artificial Sequence: Synthetic polynucleotide
atggctgctgacggttatcttccagattggctcgaggacaacctttctgaaggcattcgtgagtggtgggctctgaaacctggagtccctcaacccaaagcgaaccaacaacaccaggacgaccgtcggggtcttgtgcttccgggttacaaatacctcggacccggtaacggactcgacaaaggagagccggtcaacgaggcggacgcggcagccctcgaacacgacaaagcttacgaccagcagctcaaggccggtgacaacccgtacctcaagtacaaccacgccgacgccgagtttcaggagcgtcttcaagaagatacgtcttttgggggcaaccttggcagagcagtcttccaggccaaaaagaggatccttgagcctcttggtctggttgaggaagcagctaaaacggctcctggaaagaagaggcctgtagatcagtctcctcaggaaccggactcatcatctggtgttggcaaatcgggcaaacagcctgccagaaaaagactaaatttcggtcagactggcgactcagagtcagtcccagaccctcaacctctcggagaaccaccagcagcccccacaagtttgggatctaatacaatggcttcaggcggtggcgcaccaatggcagacaataacgagggtgccgatggagtgggtaattcctcaggaaattggcattgcgattcccaatggctgggcaacagagtcatcaccaccagcaccagaacctgggccctgcccacttacaacaaccatctctacaagcaaatctccagccaatcaggagcttcaaacgacaaccactactttggctacagcaccccttgggggtattttgactttaacagattccactgccacttctcaccacgtgactggcagcgactcattaacaacaactggggattccggcccaagaaactcagcttcaagctcttcaacatccaagttaaagaggtcacgcagaacgatggcacgacgactattgccaataaccttaccagcacggttcaagtgtttacggactcggagtatcagctcccgtacgtgctcgggtcggcgcaccaaggctgtctcccgccgtttccagcggacgtcttcatggtccctcagtatggatacctcaccctgaacaacggaagtcaagcggtgggacgctcatccttttactgcctggagtacttcccttcgcagatgctaaggactggaaataacttccaattcagctataccttcgaggatgtaccttttcacagcagctacgctcacagccagagtttggatcgcttgatgaatcctcttattgatcagtatctgtactacctgaacagaacgcaaggaacaacctctggaacaaccaaccaatcacggctgctttttagccaggctgggcctcagtctatgtctttgcaggccagaaattggctacctgggccctgctaccggcaacagagactttcaaagactgctaacgacaacaacaacagtaactttccttggacagcggccagcaaatatcatctcaatggccgcgactcgctggtgaatccaggaccagctatggccagtcacaaggacgatgaagaaaaatttttccctatgcacggcaatctaatatttggcaaagaagggacaacggcaagtaacgcagaattagataatgtaatgattacggatgaagaagagattcgtaccaccaatcctgtggcaacagagcagtatggaactgtggcaaataacttgcagagctcaaatacagctcccacgactagaactgtcaatgatcagggggccttacctggcatggtgtggcaagatcgtgacgtgtaccttcaaggacctatctgggcaaagattcctcacacggatggacactttcatccttctcctctgatgggaggctttggactgaaacatccgcctcctcaaatcatgatcaaaaatactccggtaccggcaaatcctccgacgactttcagcccggccaagtttgcttcatttatcactcagtactccactggacaggtcagcgtggaaattgagtgggagctacagaaagaaaacagcaaacgttggaatccagagattcagtacacttccaactacaacaagtctgttaatgtggactttactgtagacactaatggtgtttatagtgaacctcgccctattggaacccggtatctcacacgaaacttgtaa

SEQ ID NO: 775 - DNA, 2211 bp, Artificial Sequence
  Description of Artificial Sequence: Synthetic polynucleotide
atggctgctgacggttatcttccagattggctcgaggacaacctttctgaaggcattcgtgagtggtgggctctgaaacctggagtccctcaacccaaagcgaaccaacaacaccaggacgaccgtcggggtcttgtgcttccgggttacaaatacctcggacccggtaacggactcgacaaaggagagccggtcaacgaggcggacgcggcagccctcgaacacgacaaagcttacgaccagcagctcaaggccggtgacaacccgtacctcaagtacaaccacgccgacgccgagtttcaggagcgtcttcaagaagatacgtcttttgggggcaaccttggcagagcagtcttccaggccaaaaagaggatccttgagcctcttggtctggttgaggaagcagctaaaacggctcctggaaagaagaggcctgtagatcagtctcctcaggaaccggactcatcatctggtgttggcaaatcgggcaaacagcctgccagaaaaagactaaatttcggtcagactggcgactcagagtcagtcccagaccctcaacctctcggagaaccaccagcagcccccacaagtttgggatctaatacaatggcttcaggcggtggcgcaccaatggcggacaataacgagggtgccgatggagtgggtaattcctcaggaaattggcattgcgattcccaatggctgggcgacagagtcatcaccaccagcaccagaacctgggccctgcccacttacaacaaccatctctacaagcaaatctccagccaatcaggagcttcaaacgacaaccactactttggctacagcaccccttgggggtattttgactttaacagattccactgccacttctcaccacgtgactggcagcgactcattaacaacaactggggattccggcccaagaaactcagcttcaagctcttcaacatccaagttaaagaggtcacgcagaacgatggcacgacgactattgccaataaccttaccagcacggttcaagtgtttacggactcggagtatcagctcccgtacgtgctcgggtcggcgcaccaaggctgtctcccgccgtttccagcggacgtcttcatggtccctcagtatggatacctcaccctgaacaacggaagtcaagcggtgggacgctcatccttttactgcctggagtacttcccttcgcagatgctaaggactggaaataacttccaattcagctataccttcgaggatgtaccttttcacagcagctacgctcacagccagagtttggatcgcttgatgaatcctcttattgatcagtatctgtactacctgaacagaacgcaaggaacaacctctggaacaaccaaccaatcacggctgctttttagccaggctgggcctcagtctatgtctttgcaggccagaaattggctacctgggccctgctaccggcaacagagactttcaaagactgctaacgacaacaacaacagtaactttccttggacagcggccagcaaatatcatctcaatggccgcgactcgctggtgaatccaggaccagctatggccagtcacaaggacgatgaagaaaaatttttccctatgcacggcaatctaatatttggcaaagaagggacaacggcaagtaacgcagaattagataatgtaatgattacggatgaagaagagattcgtaccaccaatcctgtggcaacagtgcagtatggaactgtggcaaataacttgcagagctcaaatacagctcccacgactagaactgtcaatgatcagggggccttacctggcatggtgtggcaagatcgtgacgtgtaccttcaaggacctatctgggcaaagattcctcacacggatggacactttcatccttctcctctgatgggaggctttggactgaaacatccgcctcctcaaatcatgatcaaaaatactccggtaccggcaaatcctccgacgactttcagcccggccaagtttgcttcatttatcactcagtactccactggacaggtcagcgtggaaattgagtgggagctacagaaagaaaacagcaaacgttggaatccagagattcagtacacttccaactacaacaagtctgttaatgtggactttactgtagacactaatggtgtttatagtgaacctcgccctattggaacccggtatctcacacgaaacttgtaa

SEQ ID NO: 776 - DNA, 2211 bp, Artificial Sequence
  Description of Artificial Sequence: Synthetic polynucleotide
atggctgctgacggttatcttccagattggctcgaggacaacctttctgaaggcattcgtgagtggtgggctctgaaacctggagtccctcaacccaaagcgaaccaacaacaccaggacaaccgtcggggtcttgtgcttccgggttacaaatacctcggacccggtaacggactcgacaaaggagagccggtcaacgaggcggacgcggcagccctcgaacacgacaaagcttacgaccagcagctcaaggccggtgacaacccgtacctcaagtacaaccacgccgacgccgagtttcaggagcgtcttcaagaagatacgtcttttgggggcaaccttggcagagcagtcttccaggccaaaaaggggatccttgagcctcttggtctggttgaggaagcagctaaaacggctcctggaaagaagaggcctgtagatcagtctcctcaggaaccggactcatcatctggtgttggcaaatcgggcaaacagcctgccagaaaaagactaaatttcggtcagactggcgactcagagtcagtcccagaccctcaacctctcggagaaccaccagcagcccccacaagtttgggatctaatacaatggcttcaggcggtggcgcaccaatggcagacaataacgagggtgccgatggagtgggtaattcctcaggaaattggcattgcgattcccaatggctgggcgacagagtcatcaccaccagcaccagaacctgggccctgcccacttacaacaaccatctctacaagcaaatctccagccaatcaggagcttcaaacgacaaccactactttggctacagcaccccttgggggtattttgactttaacagattccactgccacttctcaccacgtgactggcagcgactcattaacaacaactggggattccggcccaagaaactcagcttcaagctcttcaacatccaagttaaagaggtcacgcagaacgatggcacgacgactattgccaataaccttaccagcacggttcaagtgtttacggactcggagtatcagctcccgtacgtgttcgggtcggcgcaccaaggctgtctcccgccgtttccagcggacgtcttcatggtccctcagtatggatacctcaccctgaacaacggaagtcaagcggtgggacgctcatccttttactgcctggagtacttcccttcgcagatgctaaggactggaaataacttccaattcagctataccttcgaggatgtaccttttcacagcagctacgctcacagccagagttcggatcgcttgatgaatcctcttattgatcagtatctgtactacctgaacagaacgcaaggaacaacctctggaacaaccaaccaatcacggctgctttttagccaggctgggcctcagtctatgtctttgcaggccagaaattggctacctgggccctgctaccggcaacagagactttcaaagactgctaacgacaacaacaacagtaactttccttgaacagcggccagcaaatatcatctcaatggccgcgactcgctggtgaatccaggaccagctatggccagtcacaaggacgatgaagaaaaatttttccctatgcacggcaatctaatatttggcaaagaagggacaacggcaagtaacgcagaattagataatgtaatgattacggatgaagaagagattcgtaccaccaatcctgtggcaacagagcagtatggaactgtggcaaataacttgcagagctcaaatacagctcccacgactagaactgtcaatgatcagggggccttacctggcatggtgtggcaagatcgtgacgtgtaccttcaaggacctatctgggcaaagattcctcacacggatggacactttcatccttctcctctgatgggaggctttggactgaaacatccgcctcctcaaatcatgatcaaaaatactccggtaccggcaaatcctccgacgactttcagcccggccaagtttgcttcatttatcactcagtactccactggacaggtcagcgtggaaattgagtgggagctacagaaagaaaacagcaaacgttggaatccagagattcagtacacttccaactacaacaagtctgttaatgtggactttactgtagacactaatggtgtttatagtgaacctcgccctattggaacccggtatctcacacgaaacttgtaa

SEQ ID NO: 777 - DNA, 2211 bp, Artificial Sequence
  Description of Artificial Sequence: Synthetic polynucleotide
atggctgctgacggttatcttccagattggctcgaggacaacctttctgaaggcattcgtgagtggtgggctctgaaacctggagtccctcaacccaaagcgaaccaacaacaccaggacaaccgtcggggtcttgtgcttccgggttacaaatacctcggacccggtaacggactcgacgaaggagagccggtcaacgaggcggacgcggcagccctcgaacacgacaaagcttacgaccagcagctcaaggccggtgacaacccgtacctcaagtacaaccacgccgacgccgagtttcaggagcgtcttcaagaagatacgtcttttgggggcaaccttggcagagcagtcttccaggccaaaaagaggatccttgagcctcttggtctggttgagggagcagctaaaacggctcctggaaagaagaggcctgtagatcagtctcctcaggaaccggactcatcatctggtgttggcaaatcgggcaaacagcctgccagaaaaagactaaatttcggtcagactggcgactcagagtcagtcccagaccctcaacctctcggagaaccaccagcagcccccacaagtttgggatctaatacaatggcttcaggcggtggcgcaccaatggcagacaataacgagggtgccgatggagtgggtaattcctcaggaaattggcattgcgattcccaatggctgggcgacagagtcatcaccaccagcaccagaacctgggccctgcccacttacaacagccacctctacaagcaaatctccagccaatcaggagcttcaaacgacaaccactactttggctacagcaccccttgggggtattttgactttaacagattccactgccacttctcaccacgtgactggcagcgactcattaacaacaactggggattccggcccaagaaactcagcttcaagctcttcaacatccaagttaaagaggtcacgcagaacgatggcacgacgactattgccaataaccttaccagcacggttcaagtgtttacggactcggagtatcagctcccgtacgtgctcgggtcggcgcaccaaggctgtctcccgccgtttccagcggacgtcttcatggtccctcagtatggatacctcaccctgaacaacggaagtcaagcggtgggacgctcatccttttactgcctggagtacttcccttcgcagatgctaaggactggaaataacttccaattcagctataccttcgaggatgtaccttttcacagcagctacgctcacagccagagtttggatcgcttgatgaatcctcttattgatcagtatctgtactacctgaacagaacgcaaggaacaacctctggaacaaccaaccaatcacggctgctttttagccaggctgggcctcagtctatgtctttgcaggccagaaattggctacctgggccctgctaccggcaacagagactttcaaagactgctaacgacaacaacaacagtaactttccttggacagcggccagcaaatatcatctcaatggccgcgactcgctggtgaatccaggaccagctatggccagtcacaaggacgatgaagaaaaatttttccctatgcacggcaatctaatatttggcaaagaagggacaacggcaagtaacgcagaattagataatgtaatgattacggatgaagaagagattcgtaccaccaatcctgtggcaacagagcagtatggaactgtggcaaataacttgcagagctcaaatacagctcccacgactagaactgtcaatgatcagggggccttacctggcatggtgtggcaagatcgtgacgtgtaccttcaaggacctatctgggcaaagattcctcacacggatggacactttcatccttctcctctgatgggaggctttggactgaaacatccgcctcctcaaatcatgatcaaaaatactccggtaccggcaaatcctccgacgactttcagcccggccaagtttgcttcatttatcactcagtactccactggacaggtcagcgtggaaattgagtgggagctacagaaagaaaacagcaaacgttggaatccagagattcagtacacttccaactacaacaagtctgttaatgtggactttactgtagacactaatggtgtttatagtgaacctcgccctattggaacccggtatctcacacgaaacttgtaa

SEQ ID NO: 778 - DNA, 2211 bp, Artificial Sequence
  Description of Artificial Sequence: Synthetic polynucleotide
atggctgctgacggttatcttccagattggctcgaggacaacctttctgaaggcattcgtgagtggtgggctctgaaacctggagtccctcaacccaaagcgaaccaacaacaccaggacaaccgtcggggtcttgtgcttccgggttacaaatacctcggacccggtaacggactcgacaaaggagagccggtcaacgaggcggacgcggcagccctcgaacacgacaaagcttacgaccagcagctcaaggccggtgacaacccgtacctcaagtacaaccacgccgacgccgagtttcaggagcgtcttcaagaagatacgtcttttgggggcaaccttggcagagcagtcttccaggccaaaaagaggatccttgagcctcttggtctggttgagggagcagctaaaacggctcctggaaagaagaggcctgtagatcagtctcctcaggaaccggactcatcatctggtgttggcaaatcgggcaaacagcctgccagaaaaagactaaatttcggtcagactggcgactcagagtcagtcccagaccctcaacctctcggagaaccaccagcagcccccacaagtttgggatctaatacaatggcttcaggcggtggcgcaccaatggcagacaataacgagggtgccgatggagtgggtaattcctcaggaaattggcattgcgattcccaatggctgggcgacagagtcatcaccaccagcaccagaacctgggccctgcccacttacaacagccatctctacaagcaaatctccagccaatcaggagcttcaaacgacaaccactactttggctacagcaccccttggggtattttgactttaacagattccactgccacttctcaccacgtgactggcagcgactcattaacaacaactggggattccggcccaagaaactcagcttcaagctcttcaacatccaagttaaagaggtcacgcagaacgatggcacgacgactattgccaataaccttaccagcacggttcaagtgtttacggactcggagtatcagctcccgtacgtgctcgggtcggcgcaccaaggctgtctcccgccgtttccagcggacgccttcatggtccctcagtatggatacctcaccctgaacaacggaagtcaagcggtgggacgctcatccttttactgcctggagtacttcccttcgcagatgctaaggactggaaataacttccaattcagctataccctcgaggatgtaccttttcacagcagctacgctcacagccagagtttggatcgcttgatgaatcctcttattgatcagtatctgtactacctgaacagaacgcaaggaacaacctctggaacaaccaaccaatcacggctgctttttagccaggctgggcctcagtctatgtctttgcaggccagaaattggctacctgggccctgctaccggcaacagagactttcaaagactgctaacgacaacaacaacagtaactttccttggacagcggccagcaaatatcatctcaatggccgcgactcgctggtgaatccaggaccagctatggccagtcacaaaggacgatgaagaaaaatttttccctatgcacggcaatctaatatttggcaaagaagggacaacggcaagtaacgcagaattagatagtgtaatgattacggatgaagaagagattcgtaccaccaatcctgtggcaacagagcagtatggaactgtggcaaataacttgcagagctcaaatacagctcccacgactagaactgtcaatgatcagggggccttacctggcatggtgtggcaagatcgtgacgtgtaccttcaaggacctatctgggcaaagattcctcacacggatggacactttcatccttctcctctgatgggaggctttggactgaaacatccgcctcctcaaatcatgatcaaaaatactccggtaccggcaaatcctccgacgactttcagcccggccaagtttgcttcatttatcactcagtactccactggacaggtcagcgtggaaattgagtgggagctacagaaagaaaacagcaaacgttggaatccagagattcagtacacttccaactacaacaagtctgttaatgtggactttactgtagacactaatggtgtttatagtgaacctcgccctattggaacccggtatctcacacgaaacttgtaa

SEQ ID NO: 779 - DNA, 2205 bp, Artificial Sequence
  Description of Artificial Sequence: Synthetic polynucleotide
atgactgacggttaccttccagattggctagaggacaacctctctgagggcgttcgagagtggtgggcgctgcaacctggagcccctaaacccaaggcaaatcaacaacatcaggacaacgctcggggtcttgtgcttccgggttacaaatacctcggacccggcaacggactcgacaagggggaacccgtcaacgcagcggacgcggcagccctcgagcacgacaaggcctacgaccagcagctcaaggccggtgacaacccctacctcaagtacaaccacgccgacgcggagttccagcagcggcttcagggcgacacatcgtttgggggcaacctcggcagagcagtcttccaggccaaaaagagggttcttgaacctcttggtctggttgagcaagcgggtgagacggctcctggaaagaagagaccgttgattgaatccccccagcagcccgactcctccacgggtatcggcaaaaaaggcaagcagccggctaaaaagaagctcgttttcgaagacgaaactggagcaggcgacggaccccctgagggatcaacttccggagccatgtctgatgacagtgagatgcgtgcagcaactggcggagctgcagtcgagggcggacaaggtgccgatggagtgggtaatgcctcgggtgattggcattgcgattccacctggtctgagggccacgtcacgaccaccagcaccagaacctgggtcttgcccacctacaacaaccacctctacaagcgactcggagagagcctgcagtccaacacctacaacggattctccaccccctggggatactttgacttcaaccgcttccactgccacttctcaccacgtgactggcagcgactcatcaacaacaactggggcatgcgacccaaagccatgcgggtcaaaatcttcaacatccaggtcaaggaggtcacgacgtcgaacggcgagacaacggtggctaataaccttaccagcacggttcagatctttgcggactcgtcgtacgaactgccgtacgtgatggatgcgggtcaagagggcagcctgcctccttttcccaacgacgtctttatggtgccccagtacggctactgtggactggtgaccggcaacacttcgcagcaacagactgacagaaatgccttctactgcctggagtactttccttcgcagatgctgcggactggcaacaactttgaaattacgtacagttttgagaaggtgcctttccactcgatgtacgcgcacagccagagcctggaccggctgatgaaccctctcatcgaccagtacctgtggggactgcaatcgaccaccaccggaaccaccctgaatgccgggactgccaccaccaactttaccaagctgcggcctaccaacctttccaactttaaaaagaactggctgcccgggccttcaatcaagcagcagggcttctcaaagactgccaatcaaaactacaagatccctgccaccgggtcagacagtctcatcaaatacgagacgcacagcactctggacggaagatggagtgccctgacccccggacctccaatggccacggctggacctgcggacagcaagttcagcaacagccagctcatctttgcggggcctaaacagaacggcaacacggccaccgtacccgggactctgatcttcacctctgaggaggagctggcagccaccaacgctaccgatacggacatgtggggcaacctacctggcggtgaccagagcaacagcaacctgccgaccgtggacagactgacagccttgggagccgtgcctggaatggtctggcaaaacagagacatttactaccagggtcccatttgggccaagattcctcataccgatggacactttcacccctcaccgctgattggtgggtttgggctgaaacacccgcctcctcaaatttttatcaagaacaccccggtacctgcgaatcctgcgacgaccttcagctctactccggtaaactccttcattactcagtacagcactggccaggtgtcggtgcagattgactgggagatccagaaggagcggtccaaacgctggaaccccgaggtccagtttacctccaactacggacagcaaaactctctgttgtgggctcccgatgcggctgggaaatacactgagcctagggctatcggtacccgctacctcacccaccacctgtaa

SEQ ID NO: 780 - DNA, 2205 bp, Artificial Sequence
  Description of Artificial Sequence: Synthetic polynucleotide
atgactgacggttaccttccagattggctagaggacaacctctctgaaggcgttcgagagtggtgggcgctgcaacctggagcccctaaacccaaggcaaatcaacaacatcaggacaacgctcggggtcttgtgcttccgggttacaaatacctcggacccggcaacggactcgacaagggggaacccgtcaacgcagcggacgcggcagccctcgagcacgacaaggcctacgaccagcagctcaaggccggtgacaacccctacctcaagtacaaccacgccgacgcggagttccagcagcggcttcagggcgacacatcgtttgggggcaacctcggcagagcagtcttccaggccaaaaagagggttcttgaacctcttggtctggttgagcaagcgggtgagacggctcctggaaagaagagaccgttgattgaatccccccagcagcccgactcctccacgggtatcggcaaaaaaggcaagcagccggctaaaaagaagctcgttttcgaagacgaaactggagcaggcgacggaccccctgagggatcaacttccggagccatgtctgatgacagtgagatgcgtgcagcagctggcggagctgcagtcgagggcggacaaggtgccgatggagtgggtaatgcctcgggtgattggcattgcgattccacctggtctgagggccacgtcacgaccaccagcaccagaacctgggtcttgcccacctacaacaaccacctctacaagcgactcggagagagcctgcagtccaacacctacaacggattctccaccccctggggatactttgacttcaaccgcttccactgccacttcttaccacgtgactggcagcgactcatcaacaacaactggggcgtgcgacccaaagccatgcgggtcaaaatcttcaacatccaggtcaaggaggtcacgacgtcgaacggcgagacaacggtggctaataaccttaccagcacggttcagatctttgcggactcgtcgtacgaactgccgtacgtgatggatgcgggtcaagagggcagcctgcctccttttcccaacgacgtctttatggtgccccagtacggctactgtggactggtgaccggcgacacttcgcagcaacagactgacagaaatgccttctactgcctggagtactttccttcgcagatgctgcggactggcaacaactttgaaattacgtacagttttgagaaggtgcctttccactcgatgtacgcgcacagccagagcctggaccggctgatgaaccctctcatcgaccagtacctgtggggactgcaatcgaccaccaccggaaccaccctgaatgccgggactgccaccaccaactttaccaagctgcggcctaccaacttttccaactttaaaaagaactggctgcccgggccttcaatcaagcagcagggcttctcaaagactgccaatcaaaactacaagatccctgccaccgggtcagacagtctcatcaaatacgagacgcacagcactctggacggaagatggagtgccctgacccccggacctccaatggccacggctggacctgcggacagcaagttcagcaacagccagctcatctttgcggggcctaaacagaacggcaacacggccaccgtacccgggactctgatcttcacctctgaggaggagctggcagccaccaacgccaccgatacggacatgtggggcaacctacctggcggtgaccagagcaacagcaacctgccgaccgtggacagactgacagccttgggagccgtgcctggaatggtctggcaaaacagagacatttactaccagggtcccatttgggccaagattcctcataccgatggacactttcacccctcaccgctgattggtgggtttgggctgaaacacccgcctcctcaaatttttatcaagaacaccccggtacctgcgaatcctgcgacgaccttcagctctactccggtaaactccttcattactcagtacagcactggccaggtgtcggtgcagattgactgggagatccagaaggagcggtccaaacgctggaaccccgaggtccagtttacctccaactacggacagcaaaactctctgttgtgggctcccgatgcggctgggaaatacactgagcctagggctatcggtacccgctacctcacccaccacctgtaa

SEQ ID NO: 781 - DNA, 2205 bp, Artificial Sequence
  Description of Artificial Sequence: Synthetic polynucleotide
atgactgacggttaccttccagattggctagaggacaacctctctgaaggcgttcgagagtggtgggcgctgcaacctggagcccctaaacccaaggcaaatcaacaacatcaggacaacgctcggggtcttgtgcttccgggttacaaatacctcggacccggcaacggactcgacgagggggaacccgtcaacgcagcggacgcggcagccctcgagcacgacaaggcctacgaccagcagctcaaggccggtgacaacccctacctcaagtacaaccacgccgacgcggagttccagcagcggcttcagggcgacacatcgtttgggggcaacctcggcagagcagtcttccaggccaaaaagagggttcttgaacctcttggtctggttgagcaagcgggtgagacggctcctggaaagaagagaccgttgattgaatccccccagcagcccgactcctccacgggtatcggcaaaaaaggcaagcagccggctaaaaagaagctcgttttcgaagacgaaactggagcaggcgacggaccccctgagggatcaacttccggagccatgtctgatgacagtgagatgcgtgcagcagctggcggagctgcagtcgagggcggacaaggtgccgatggagtgggtaatgcctcgggtgattggcattgcgattccacctggtctgagggccacgtcacgaccaccagcaccagaacctgggtcttgcccacctacaacaaccacctctacaagcgactcggagagagcctgcagtccaacacctacaacggattctccaccccctggggatactttgacttcaaccgcttccactgccacttctcaccacgtgactggcagcgactcatcaacaacaactggggcatgcgacccaaagccatgcgggtcaaaatcttcaacatccaggtcaaggaggtcacgacgtcgaacggcgagacaacggtggctaataaccttaccagcacggttcagatctttgcggactcgtcgtacgaactgccgtacgtgatggatgcgggtcaagagggcagcctgcctccttttcccaacgacgtctttatggtgccccagtacggctactgtggactggtgaccggcaacacttcgcagcaacagactgacagaaatgccttctactgcctggagtactttccttcgcagatgctgcggactggcaacaactttgaaattacgtacagttttgagaaggtgcctttccactcgatgtacgcgcacagccagagcctggaccggctgatgaaccctctcatcgaccagtacctgtggggactgcaatcgaccaccaccggaaccaccctgaatgccgggactgccaccaccaactttaccaagctgcggcctaccaacttttccaactttaaaaagaactggctgcccgggccttcaatcaagcagcagggcttctcaaagactgccaatcaaaactacaagatccctgccaccgggtcagacagtctcatcaaatacgagacgcacagcactctggacggaagatggagtgccctgacccccggacctccaatggccacggctggacctgcggacagcaagttcagcaacagccagctcatctttgcggggcctaaacagaacggcaacacggccaccgtacccgggactctgatcttcacctctgaggaggagctggcagccaccaacgctaccgatacggacatgtggggcaacctacctggcggtgaccagagcaacagcaacctgccgaccgtggacagactgacagccttgggagccgtgcctggaatggtctggcaaaacagagacatttactaccagggtcccatttgggccaagattcctcataccgatggacactttcacccctcaccgctgattggtgggtttgggctgaaacacccgcctcctcaaatttttatcaagaacaccccggtacctgcgaatcctgcgacgaccttcagctctactccggtaaactccttcattactcagtacagcactggccaggtgtcggtgcagattgactgggagatccagaaggagcggtccaaacgctggaaccccgaggtccagtttacctccaactacggacagcaaaactctctgttgtgggctcccgatgcggctgggaaatacactgagcctagggctatcggtacccgctacctcacccaccacctgtaa

SEQ ID NO: 782 - DNA, 2205 bp, Artificial Sequence
  Description of Artificial Sequence: Synthetic polynucleotide
atgactgacggttaccttccagattggctagaggacaacctctctgaaggcgttcgagagtggtgggcgctgcaacctggagcccctaaacccaaggcaaatcaacaacatcaggacaacgctcggggtcttgtgcttccgggttacaaatacctcggacccggcaacggactcgacaagggggaacccgtcaacgcagcggacgcggcagccctcgagcacgacaaggcctacgaccagcagctcaaggccggtgacaacccctacctcaagtacaaccacgccgacgcggagttccagcagcggcttcagggcgacacatcgtttgggggcaacctcggcagagcagtcttccaggccaaaaagagggttcttgaacctcttggtctggttgagcaagcgggtgagacggctcctggaaagaagagaccgttgattgaatccccccagcagcccgactcctccacgggtatcggcaaaaaaggcaagcagccggctaaaaagaagctcgttttcgaagacggaactggagcaggcgacggaccccctgagggatcaacttccggagccatgtctgatgacagtgagatgcgtgcagcagctggcggagctgcagtcgagggcggacaaggtgccgatggagtgggtaatgcctcgggtgattggcattgcgattccacctggtctgagggccacgtcacgaccaccagcaccagaacctgggtcttgcccacctacaacaaccacctctacaagcgactcggagagagcctgcagtccaacacctacaacggattccccaccccctggggatactttgacttcaaccgcttccactgccacttctcaccacgtgactggcagcgactcatcaacaacaactggggcatgcgacccaaagccatgcgggtcaaaatcttcaacatccaggtcaaggaggtcacgacgtcgaacggcgagacaacggcggctaataaccttaccagcacggttcagatctttgcggactcgtcgtacgaactgccgtacgtgatggatgcgggtcaagagggcagcctgcctccttttcccaacgacgtctttatggtgccccagtacggctactgtggactggtgaccggcaacacttcgcagcaacagactgacagaaatgccttctactgcctggagtactttccttcgcagatgctgcggactggcaacaactttgaaattacgtacagttttgagaaggtgcctttccactcgatgtacgcgcacagccagagcctggaccggctgatgaaccctctcatcgaccagtacctgtggggactgcaatcgaccaccaccggaaccaccctgaatgccgggactgccaccaccaactttaccaagctgcggcctaccaacttttccaactttaaaaagaactggctgcccgggccttcaatcaagcagcagggcttctcaaagactgccaatcaaaactacaagatccctgccaccgggtcagacagtctcatcaaatacgagacgcacagcactctggacggaagatggagtgccctgacccccggacctccaatggccacggctggacctgcggacagcaagttcagcaacagccagctcatctttgcggggcctaaacagaacggcaacacggccaccgtacccgggactctgatcttcacctctgaggaggagctggcagccaccaacgccaccgatacggacatgtggggcaacctacctggcggtgaccagagcaacagcaacctgccgaccgtggacagactgacagccttgggagccgtgcctggaatggtctggcaaaacagagacatttactaccagggtcccatttgggccaagattcctcataccgatggacactttcacccctcaccgctgattggtgggtttgggctgaaacacccgcctcctcaaatttttatcaagaacaccccggtacctgcgaatcctgcgacgaccttcagctctactccggtaaactccttcattactcagtacagcactggccaggtgtcggtgcagattgactgggagatccagaaggagcggtccaaacgctggaaccccgaggtccagtttacctccaactacggacagcaaaactctctgttgtgggctcccgatgcggctgggaaatacactgagcctagggctatcggtacccgctacctcacccaccacctgtaa

SEQ ID NO: 783 - DNA, 2205 bp, Artificial Sequence
  Description of Artificial Sequence: Synthetic polynucleotide
atgactgacggttaccttccagattggctagaggacaacctctctgaaggcgttcgagagtggtgggcgctgcaacctggagcccctaaacccaaggcaaatcaacaacatcaggacaacgctcggggtcttgtgcttccgggttacaaatacctcggacccggcaacggactcgacaagggggaacccgtcaacgcagcggacgcggcagccctcgagcacgacaaggcctacgaccagcagctcaaggccggtgacaacccctacctcaagtacaaccacgccgacgcggagttccagcagcggcttcagggcgacacatcgtttgggggcaacctcggcagagcagtcttccaggccaaaaagagggttcttgaacctcttggtctggttgagcaagcgggtgagacggctcctggaaagaagagaccgttgattgaatccccccagcagcccgactcctccacgggtatcggcaaaaaaggcaagcagccggctaaaaagaagctcgttttcgaagacgaaactggagcaggcgacggaccccctgagggatcaacttccggagccatgtctgatgacagtgagatgcgtgcagcagctggcggagctgcagtcgagggcggacaaggtgccgatggagtgggtaatgcctcgggtgattggcattgcgattccacctggtctgagggccacgtcacgaccaccagcaccagaacctgggtcttgcccacctacaacaaccacctctacaagcgactcggagagagcctgcagtccaacacctacaacggattctccaccccctggggatactttgacttcaaccgcttccactgccacttctcaccacgtgactggcagcgactcatcaacaacaactggggcatgcgacccaaagccatgcgggtcaaaatcttcaacatccaggtcaaggaggtcacgacgtcgaacggcgagacaacggtggctaataaccttaccagcacggttcagatctttgcggactcgtcgtacgaactgccgtacgtgatggatgcgggtcaagagggcagcctgcctccttttcccaacgacgtctttatggtgccccagtacggctaccgtggactggtgaccggcaacacttcgcagcaacagactgacagaaatgccttctactgcctggagtactttccttcgcagatgctgcggactggcaacaactttgaaattacgtacagttttgagaaggtgcctttccactcgatgtacgcgcacagccagagcctggaccggctgatgaaccctctcatcgaccagtacctgtggggactgcaatcgaccaccaccggaaccaccctgaatgccgggactgccaccaccaactttaccaagctgcggcctaccaacttttccaactttaaaaagaactggctgcccgggccttcaatcaagcagcagggcttctcaaagactgccaatcaaaactacaagatccctgccaccgggtcagacagtctcatcaaatacgagacgcacagcactctggacggaagatggagtgccctgacccccggacctccaatggccacggctggacctgcggacagcaagttcagcaacagccagctcatctttgcggggcctaaacagaacggcaacacggccaccgtacccgggactctgatcttcacctctgaggaggagctggcagccaccaacgccaccgatacggacatgtggggcaacctacctggcggtgaccagagcaacagcaacctgccgaccgtggacagactgacagccttgggagccgtgcctggaatggtctggcaaaacagagacatttactaccagggtcccatttgggccaagattcctcataccgatggacactttcacccctcaccgctgattggtgggtttgggctgaaacacccgcctcctcaaatttttatcaagaacaccccggtacctgcgaatcctgcgacgaccttcagctctactccggtaaactccttcattactcagtacagcactggccaggtgtcggtgcagattgactgggagatccagaaggagcggtccaaacgctggaaccccgaggtccagtttacctccaactacggacagcaaaactctctgttgtgggctcccgatgcggctgggaaatacactgagcctagggctatcggtacccgctacctcacccaccacctgtaa

SEQ ID NO: 784 - DNA, 2205 bp, Artificial Sequence
  Description of Artificial Sequence: Synthetic polynucleotide
atgactgacggttaccttccagattggctagaggacaacctctctgaaggcgttcgagagtggtgggcgctgcaacctggagcccctaaacccaaggcaaatcaacaacatcaggacaacgctcggggtcttgtgcttcagggttacaaatacctcggacccggcaacggactcgacaagggggaacccgtcaacgcagcggacgcggcagccctcgagcacgacaaggcctacgaccagcagctcaaggccggtgacaacccctacctcaagtacaaccacgccgacgcggagttccagcagcggcttcagggcgacacatcgtttgggggcaacctcggcagagcagtcttccaggccaaaaagagggttcttgaaccccttggtctggttgagcaagcgggtgagacggctcctggaaagaagagaccgttgattgaatccccccagcagcccgactcctccacgggtatcggcaaaaaaggcaagcagccggctaaaaagaagctcgttttcgaagacgaaactggagcaggcgacggaccccctgagggatcaacttccggagccatgtctgatgacagtgagatgcgtgcagcagctggcggagctgcagtcgagggcggacaaggtgccgatggagtgggtaatgcctcgggtgattggcattgcgattccacccggtctgagggccacgtcacgaccaccagcaccagaacctgggtcttgcccacctacaacaaccacctctacaagcgactcggagagagcctgcagtccaacacctacaacggattctccaccccctggggatactttgacttcaaccgcttccactgccacttctcaccacgtgactggcagcgactcatcaacaataactggggcatgcgacccaaagccatgcgggtcaaaatcttcaacatccaggtcaaggaggtcacgacgtcgaacggcgagacaacggtggctaataaccttaccagcacggttcagatctttgcggactcgtcgtacgaactgccgtacgtgatggatgcgggtcaagagggcagcctgcctccttttcccaacgacgtctttatggtgccccagtacggctactgtggactggtgaccggcaacacttcgcagcaacagactgacagaaatgccttctactgcctggagtactttccttcgcagatgctgcggactggcaacaactttgaaattacgtacagttttgagaaggtgcctttccactcgatgtacgcgcacagccagagcctggaccggctgatgaaccctctcatcgaccagtacctgtggggactgcaatcgaccaccaccggaaccaccctgaatgccgggactgccaccaccaactttaccaagctgcggcctaccaacttttccaactttaaaaagaactggctgcccgggccttcaatcaagcagcagggcttctcaaagactgccaatcaaaactacaagatccctgccaccgggtcagacagtctcatcaaatacgagacgcacagcactctggacggaagatggagtgcccggacccccggacctccaatggccacggctggacctgcggacagcaagttcagcaacagccagctcatctttgcggggcctaaacagaacggcaacacggccaccgtacccgggactctgatcttcacctctgaggaggagctggcagccaccaacgccaccgatacggacatgtggggcaacctacctggcggtgaccagagcaacagcaacctgccgaccgtggacagactgacagccttgggagccgtgcctggaatggtctggcaaaacagagacatttactaccagggtcccatttgggccaagattcctcataccgatggacactttcacccctcaccgctgattggtgggtttgggctgaaacacccgcctcctcaaatttttatcaagaacaccccggtacctgcgaatcctgcgacgaccttcagctctactccggtaaactccttcattactcagtacagcactggccaggtgtcggtgcagattgactgggagatccagaaggagcggtccaaacgctggaaccccgaggtccagtttacctccaactacggacagcaaaactctctgttgtgggctcccgatgcggctgggaaatacactgagcctagggctatcggtacccgctacctcacccaccacctgtaa

SEQ ID NO: 785 - DNA, 2175 bp, Artificial Sequence
  Description of Artificial Sequence: Synthetic polynucleotide
atgtcttttgttgatcaccctccagattggttggaagaagttggtgaaggtcttcgcgagtttttgggccttgaagcgggcccaccgaaaccaaaacccaatcagcagcatcaagatcaagcccgtggtcttgtgctgcctggttataactatctcggacccggaaacggtctcgatcgaggagagcctgtcaacagggcagacgaggtcgcgcgagagcacgacatctcgtacaacgagcagcttgaggcgggagacaacccctacctcaagtacaaccacgcggacgccgagtttcaggagaggctcgccgacgacacatccttcgggggaaacctcggaaaggcagtctttcaggccaagaaaagggttctcgaaccttttggcctggttgaagagggtgctaagacggcccctaccggaaagcggatagacgaccactttccaaaaagaaagaaggcccggaccgaagaggactccaagccttccacctcgtcagacgccgaagctggacccagcggatcccagcagctgcaaatcccagcccaaccagcctcaagtttgggagctgatacaatgtctgcgggaggtggcggcccattgggcgacaataaccaaggtgccgatggagtgggcaatgcctcgggagattggcattgcgattccacgtggatgggggacagagtcgtcaccaagtccacccgaacctgggtgctgcccagctacaacaaccaccagtaccgagagatcaaaagcggctccgtcgacggaagcaacgccaacgcctactttggatacagcaccccctgggggtactttgactttaaccgcttccacagccactggagcccccgagactggcaaagactcatcaacaactactggggcttcagaccccggtccctcagagtcaaaatcttcaacattcaagtcaaagaggtcacggtgcaggactccaccaccaccatcgccaacaacctcacctccaccgtccaagtgtttacggacgacgactaccagctgccctacgtcgtcggcaacgggaccgagggatgcctgccggccttccctccgcaggtctttacgctgccgcagtacggttacgcgacgctgaaccgcgacaacacagaaaatcccaccgagaggagcagcttcttctgcctagagtactttcccagcaagatgctgagaacgggcaacaactttgagtttacctacaactttgaggaggtgcccttccactccagcttcgctcccagtcagaacctcttcaagctggccaacccgctggtggaccagtacttgtaccgcttcgtgagcacaaataacactggcggagtccagttcaacaagaacctggccgggagatacgccaacacctacaaaaactggttcccggggcccatgggccgaacccagggctggaacctgggctccggggtcaaccgcgccagtgtcagcgccttcgccacgaccaataggatggagctcgagggcgcgagttaccaggtgcccccgcagccgaacggcatgaccaacaacctccagggcagcaacacctatgccctggagaacactatgatcttcaacagccagccggcgaacccgggcaccaccgccacgtacctcgagggcaacatgctcatcaccagcgagagcgagacgcagccggtgaaccgcgtggcgtacaacgtcggcgggcagatggccaccaacaaccagagctccaccactgcccccgcgaccggcacgtacaacctccaggaaatcgtgcccggcagcgtgtggatggagagggacgtgtacctccaaggacccatctgggccaagatcccagagacggaggcgcactttcacccctctccggccatgggcggattcggactcaaacacccaccgcccatgatgctcatcaagaacacgcctgtgcccggaaatatcaccagcttctcggacgtgcccgtcagcagcttcatcacccagtacagcaccgggcaggtcaccgtggagatggagtgggagctcaagaaggaaaactccaagaggtggaacccagagatccagtacacaaacaactacaacgacccccagtttgtggactttgccccggacagcaccggggaatacagaaccaccagacctatcggaacccgataccttacccgacccctttaa

SEQ ID NO: 786 - DNA, 2175 bp, Artificial Sequence
  Description of Artificial Sequence: Synthetic polynucleotide
atgtcttttgttgatcaccctccagattggttggaagaagttggtgaaggtcttcgcgagtttttgggccttgaagcgggcccaccgaaaccaaaacccaatcagcagcatcaagatcaagcccgtggtcttgtgctgcctggttataactatctcggacccggaaacggtctcgatcgaggagagcctgtcaacagggcagacgaggtcgcgcgagagcacgacatctcgtacaacgagcagcttgaggcgggagacaacccctacctcaagtacaaccacgcggacgccgagtttcaggagaagctcgccgacgacacatcctccgggggaaacctcggaaaggcagtctttcaggccaagaaaagggttctcgaaccttttggcctggttgaagagggtgctaagacggcccctaccggaaagcggatagacgaccactttccaaaaagaaagaaggcccggaccgaagaggactccaagccttccacctcgtcagacgccgaagctggacccagcggatcccagcagctgcaaatcccagcccaaccagcctcaagtttgggagctgatacaatgtctgcgggaggtggcggcccattgggcgacaataaccaaggtgccgatggagtgggcaatgcctcgggagattggcattgcgattccacgtggatgggggacagagtcgtcaccaagtccacccgaacctgggtgctgcccagctacaacaaccaccagtaccgagagatcaaaagcggctccgtcgacggaagcaacgccaacgcctactttggatacagcaccccctgggggtactttgactttaaccgcttccacagccactggagcccccgagactggcaaagactcatcaacaactactggggcttcagaccccggtccctcagagtcaaaatcttcaacattcaagtcaaagaggtcacggtgcaggactccaccaccaccatcgccaacaacctcacctccaccgtccaagtgtttacggacgacgactaccagctgccctacgtcgtcggcaacgggaccgagggatgcctgccggccttccctccgcaggtctttacgctgccgcagtacggttacgcgacgctgaaccgcgacaacacagaaaatcccaccgagaggagcagcttcttctgcctagagtactttcccagcaagatgctgagaacgggcaacaactttgagtttacctacaactttgaggaggtgcccttccactccagcttcgctcccagtcagaacctcttcaagctggccaacccgctagtggaccagtacttgtaccgcttcgtgagcacaaataacactggcggagtccagttcaacaagaacctggccgggagatacgccaacacctacaaaaactggttcccggggcccatgggccgaacccagggctggaacctgggctccggggtcaaccgcgccagtgtcagcgccttcgccacgaccaataggatggagctcgagggcgcgagttaccaggtgcccccgcagccgaacggcatgaccaacaacctccagggcagcaacacctatgccctggagaacactatgatcttcaacagccagccggcgaacccgggcaccaccgccacgtacctcgagggcaacatgctcatcaccagcgagagcgagacgcagccggtgaaccgcgtggcgtacaacgtcggcgggcagatggccaccaacaaccagagctccaccactgcccccgcgaccggcacgtacaacctccaggaaatcgtgcccggcagcgtgtggatggagagggacgtgtacctccaaggacccatctgggccaagatcccagagacgggggcgcactttcacccctctccggccatgggcggattcggactcaaacacccaccgcccatgatgctcatcaagaacacgcctgtgcccggaaatatcaccagcttctcggacgtgcccgtcagcagcttcatcacccagtacagcaccgggcaggtcaccgtggagatggagtgggagctcaagaaggaaaactccaagaggtggaacccagagatccagtacacaaacaactacaacgacccccagtttgtggactttgccccggacagcaccggggaatacagaaccaccagacctatcggaacccgataccttacccgacccctttaa

SEQ ID NO: 787 - DNA, 2175 bp, Artificial Sequence
  Description of Artificial Sequence: Synthetic polynucleotide
atgtcttttgttgatcaccctccagattggttggaagaagttggtgaaggtcttcgcgagtttttgggccttgaagcgggcccaccgaaaccaaaacccaatcagcagcatcaagatcaagcccgtggtcttgtgctgcctggttataactatctcggacccggaaacggtctcgatcgaggagagcctgtcaacagggcagacgaggtcgcgcgagagcacgacatctcgtacaacgagcagcttgaggcgggagacaacccctacctcaagtacaaccacgcggacgccgagtttcaggagaagctcgccgacgacacatccttcgggggaaacctcggaaaggcagtctttcaggccaagaaaagggttctcgaaccttttggcctggttgaagagggtgctaagacggcccctaccggaaagcggatagacgaccactttccaaaaagaaagaaggcccggaccgaagaggactccaagccttccacctcgtcagacgccgaagctggacccagcggatcccagcagctgcaaatcccagcccaaccagcctcaagtttgggagctgatacaatgtctgcgggaggtggcggcccattgggcgacaataaccaaggtgccgatggagtgggcaatgcctcgggagattggcattgcgattccacgtggatgggggacagagtcgtcaccaagtccacccgaacctgggtgctgcccagctacaacaaccaccagtaccgagagatcaaaagcggctccgtcgacggaagcaacgccaacgcctactttggatacagcaccccctgggggtactttgactttaaccgcttccacagccactggagcccccgagactggcaaagactcatcaacaactactggggcttcagaccccggtccctcagagtcaaaatcttcaacattcaagtcaaagaggtcacggtgcaggactccaccaccaccatcgccaacaacctcacctccaccgtccaagtgtttacggacgacgactaccagctgccctacgtcgtcggcaacgggaccgagggatgcctgccggccttccctccgcaggtctttacgctgccgcagtacggttacgcgacactgaaccgcgacaacacagaaaatcccaccgagaggagcagcttcttctgcctagagtactttcccagcaagatgctgagaacgggcaacaactttgagtttacctacaactttgaggaggtgcccttccactccagcttcgctcccagtcagaacctcttcaagctggccaacccgctggtggaccagtacttgtaccgcttcgtgagcacaaataacactggcggagtccagttcaacaagaacctggccgggagatacgccaacacctacaaaaactggttcccggggcccatgggccgaacccagggctggaacctgggctccggggtcaaccgcgccagtgtcagcgccttcgccacgaccaataggatggagctcgagggcgcgagttaccaggtgcccccgcagccgaacggcatgaccaacaacctccagggcagcaacacctatgccctggagaacactatgatcttcaacagccagccggcgaacccgggcaccaccgccacgtacctcgagggcaacatgctcatcaccagcgagagcgagacgcagccggtgaaccgcgtggcgtacaacgtcggcgggcagatggccaccaacaaccagagctccaccactgcccccgcgaccggcacgtacaacctccaggaaatcgtgcccggcagcgtgtggatggagagggacgtgtacctccaaggacccatctgggccaagatcccagagacgggggcgcactttcacccctctccggccatgggcggattcggactcaaacacccaccgcccatgatgctcatcaagagcacgcctgtgcccggaaatatcaccagcttctcggacgtgcccgtcagcagcttcatcacccagtacagcaccgggcaggtcaccgtggagatggagtgggagctcaagaaggaaaactccaagaggtggaacccagagatccagtacacaaacaactacaacgacccccagtttgtggactttgccccggacagcaccggggaatacagaaccaccagacctatcggaacccgataccttacccgacccctttaa

SEQ ID NO: 788 - DNA, 2175 bp, Artificial Sequence
  Description of Artificial Sequence: Synthetic polynucleotide
atgtcttttgttgatcaccctccagattggttggaagaagttggtgaaggtcttcgcgagtttttgggccctgaagcgggcccaccgaaaccaaaacccaatcagcagcatcaagatcaagcccgtggtcttgtgctgcctggttataactatctcggacccggaaacggtctcgatcgaggagagcctgtcaacagggcagacgaggtcgcgcgagagcacgacatctcgtacaacgagcagcttgaggcgggagacaacccctacctcaagtacaaccacgcggacgccgagtttcaggagaagctcgccgacgacacatccttcgggggaaacctcggaaaggcagtctttcaggccaagaaaagggttctcgaaccttttggcctggttgaagagggtgctaagacggcccctaccggaaagcggatagacgaccactttccaaaaagaaagaaggtccggaccgaagaggactccaagccttccacctcgtcagacgccgaagctggacccagcggatcccagcagctgcaaatcccagcccaaccagcctcaagtttgggagctgatacaatgtctgcgggaggtggcggcccattgggcgacaataaccaaggtgccgatggagtgggcaatgcctcgggagattggcattgcgattccacgtggatgggggacagagtcgtcaccaagtccacccgaacctgggtgccgcccagctacaacaaccaccagtaccgagagatcaaaagcggctccgtcgacggaagcaacgccaacgcctactttggatacagcaccccctgggggtactttgactttaaccgcttccacagccactggagcccccgagactggcaaagactcatcaacaactactggggcttcagaccccggtccctcagagtcaaaatcttcaacattcaagtcaaagaggtcacggtgcaggactccaccaccaccatcgccaacaacctcacctccaccgtccaagtgtttacggacgacgactaccagctgccctacgtcgtcggcaacgggaccgagggatgcctgccggccttccctccgcaggtctttacgctgccgcagtacggttacgcgacgctgaaccgcgacaacacagaaaatcccaccgagaggagcagcttcttctgcctagagtactttcccagcaagatgctgagaacgggcaacaactttgagtttacctacaactttgaggaggtgcccttccactccagcttcgctcccagtcagaacctcttcaagctggccaacccgctggtggaccagtacttgtaccgcttcgtgagcacaaataacactggcggagtccagttcaacaagaacctggccgggagatacgccaacacctacaaaaactggttcccggggcccatgggccgaacccagggctggaacctgggctccggggtcaaccgcgccagtgtcagcgccttcgccacgaccaataggatggagctcgagggcgcgagttaccaggtgcccccgcagccgaacggcatgaccaacaacctccagggcagcaacacctatgccctggagaacactatgatcttcaacagccagccggcgaacccgggcaccaccgccacgtacctcgagggcaacatgctcatcaccagcgagagcgagacgcagccggtgaaccgcgtggcgtgcaacgtcggcgggcagatggccaccaacaaccagagctccaccactgcccccgcgaccggcacgtacaacctccaggaaatcgtgcccggcagcgtgtggatggagagggacgtgtacctccaaggacccatctgggccaagatcccagagacgggggcgcactttcacccctctccggccatgggcggattcggactcaaacacccaccgcccatgatgctcatcaagaacacgcctgtgcccggaaatatcaccagcttctcggacgtgcccgtcagcagcttcatcacccagtacagcaccgggcaggtcaccgtggagatggagtgggagctcaagaaggaaaactccaagaggtggaacccagagatccagtacacaaacaactacaacgacccccagtttgtggactttgccccggacagcaccggggaatacagaaccaccagacctattggaacccgataccttacccgacccctttaa

SEQ ID NO: 789 - DNA, 2175 bp, Artificial Sequence
  Description of Artificial Sequence: Synthetic polynucleotide
atgtcttttgttgatcaccctccagattggttggaagaagttggtgaaggtcttcgcgagtttttgggccttgaagcgggcccaccgaaaccaaaacccaatcagcagcatcaagatcaagcccgtggtcttgtgctgcctggttataactatctcggacccggaaacggtctcgatcgaggagagcctgtcaacagggcagacgaggtcgcgcgagagcacgacatctcgtacaacgagcagcttgaggcgggagacaacccctacctcaagtacaaccacgcggacgccgagtttcaggagaagctcgccgacgacacatccttcgggggaaacctcggaaaggcagtctttcaggccaagaaaagggttctcgaaccttttggcctggttgaagagggtgctaagacggcccctaccggaaagcggatagacgaccactttccaaaaagaaagaaggcccggaccgaagaggactccaagccttccacctcgtcagacgccgaagctggacccagcggatcccagcagctgcaaatcccagcccaaccagcctcaagtttgggagctgatacaatgtctgcgggaggtggcggcccattgggcgacaataaccaaggtgccgatggagtgggcaatgcctcgggagattggcattgcgattccacgtggatgggggacagagtcgtcaccaagtccacccgaacctgggtgctgcccagctacaacaaccaccagtaccgagagatcaaaagcggctccgtcgacggaagcaacgccaacgcctactttggatacagcaccccctgggggtactttgactttaaccgcttccacagccactggagcccccgagactggcaaagactcatcaacaactactggggcttcagaccccggtccctcagagtcaaaatcttcaacattcaagtcaaagaggtcacggtgcaggactccaccaccaccatcgccaacaacctcacctccaccgtccaagtgtttacggacgacgactaccagctgccctacgtcgtcggcaacgggaccgagggatgcctgccggccttccctccgcaggtctttacgctgccgcagtacggttacgcgacgctgaaccgcgacaacaccgaaaatcccaccgagaggagcagcttcttctgcctagagtactttcccagcaagatgctgagaacgggcaacaactttgagtttacctacaactttgaggaggtgcccttccactccagcttcgctcccagtcagaacctcttcaagctggccaacccgctggtggaccagtacttgtaccgcttcgtgagcacaaataacactggcggagtccagttcaacaagaacctggccgggagatacgccaacacctacaaaaactggttcccggggcccatgggccgaacccagggctggaacctgggctccggggtcaaccgcgccagtgtcagcgccttcgccacgaccaataggatggagctcgagggcgcgagttaccaggtgcccccgcagccgaacggcatgaccaacaacctccagggcagcaacacctatgccctggagaacactatgatcttcaacagccagccggcgaacccgggcaccaccgccacgtacctcgagggcaacatgctcatcaccagcgagagcgagacgcagccggtgaaccgcgtggcgtacaacgtcggcgggcagatggccaccaacaaccagagctccaccactgcccccgcgaccggcgcgtacaacctccaggaaatcgtgcccggcagcgtgtggatggagagggacgtgtacctccaaggacccatctgggccaagatcccagagacgggggcgcactttcacccctctccggccatgggcggattcggactcaaacacccaccgcccatgatgctcatcaagaacacgcctgtgcccggaaatatcaccagcttctcggacgtgcccgtcagcagcttcatcacccagtacagcaccgggcaggtcaccgtggagatggagtgggagctcaagaaggaaaactccaagaggtggaacccagagatccagtacacaaacaactacaacgacccccagtttgtggactttgccccggacagcaccggggaatacagaaccaccagacctatcggaacccgataccttacccgacccctttaa

SEQ ID NO: 790 - DNA, 2175 bp, Artificial Sequence
  Description of Artificial Sequence: Synthetic polynucleotide
atgtcttttgttgatcaccctccagattggttggaagaagttggtgaaggtcttcgcgagtttttgggccttgaagcgggcccaccgaaaccaaaacccaatcagcagcatcaagatcaagcccgtggtcttgtgctgcctggttataactatctcggacccggaaacggtctcgatcgaggagagcctgtcaacagggcagacggggtcgcgcgagagcacgacatctcgtacaacgagcagcttgaggcgggagacaacccctacctcaagtacaaccacgcggacgccgagtttcaggagaagctcgccgacgacacatccttcgggggaaacctcggaaaggcagtctttcaggccaagaaaagggttctcgaaccttttggcctggttgaagagggtgctaagacggcccctaccggaaagcggatagacgaccactttccaaaaagaaagaaggcccggaccgaagaggactccaagccttccacctcgtcagacgccgaagctggacccagcggatcccagcagctgcaaatcccagcccaaccagcctcaagtttgggagctgatacaatgtctgcgggaggtggcggcccattgggcgacaataaccaaggtgccgatggagtgggcaatgcctcgggagattggcattgcgattccacgtggatgggggacagagtcgtcaccaagtccacccgaacctgggtgctgcccagctacaacaaccaccagtaccgagagatcaaaagcggctccgtcgacggaagcaacgccaacgcctactttggatacagcaccccctgggggtactttgactttaaccgcttccacagccactggagcccccgagactggcaaagactcatcaacaactactggggcttcagaccccggtccctcagagtcaaaatcttcaacattcaagtcaaagaggtcacggtgcaggactccaccaccaccatcgccaacaacctcacctccaccgtccaagcgtttacggacgacgactaccagctgccctacgtcgtcggcaacgggaccgagggatgcctgccggccttccctccgcaggtctttacgctgccgcagtacggttacgcgacgctgaaccgcgacaacacagaaaatcccaccgagaggagcagcttcttctgcctagagtactttcccagcaagatgctgagaacgggcaacaactttgagtttacctacaactttgaggaggtgcccttccactccagcttcgctcccagtcagaacctcttcaagctggccaacccgctggtggaccagtacttgtaccgcttcgtgagcacaaataacactggcggagtccagttcaacaagaacctggccgggagatacgccaacacctacaaaaactggttcccggggcccatgggccgaacccagggctggaacctgggctccggggtcaaccgcgccagtgtcagcgccttcgccacgaccaataggatggagctcgagggcgcgagttaccaggtgcccccgcagccgaacggcatgaccaacaacctccagggcagcaacacctatgccctggagaacactatgatcttcaacagccagccggcgaacccgggcaccaccgccacgtacctcgagggcaacatgctcatcaccagcgagagcgagacgcagccggtgaaccgcgtggcgtacaacgtcggcgggcagatggccaccaacaaccagagctccaccactgcccccgcgaccggcacgtacaacctccaggaaatcgtgcccggcagcgtgtggatggagagggacgtgtacctccaaggacccatctgggccaagatcccagagacgggggcgcactttcacccctctccggccatgggcggattcggactcaaacacccaccgcccatgatgctcatcaagaacacgcctgtgcccggaaatatcaccagcttctcggacgtgcccgtcagcagcttcatcacccagtacagcaccgggcaggtcaccgtggagatggagtgggagctcaagaaggaaaactccaagaggtggaacccagagatccagtacacaaacaactacaacgacccccagtttgtggactttgccccggacagcaccggggaatacagaaccaccagacctatcggaacccgataccttacccgacccctttaa

SEQ ID NO: 791 - DNA, 2175 bp, Artificial Sequence
  Description of Artificial Sequence: Synthetic polynucleotide
atgtcttttgttgatcaccctccagattggttggaagaagttggtgaaggtcttcgcgagtttttgggccttgaagcgggcccaccgaaaccaaaacccaatcagcagcatcaagatcaagcccgtggtcttgtgctgcctggttataactatctcggacccggaaacggtctcgatcgaggagagcctgtcaacagggcagacgaggtcgcgcgagagcacgacatctcgtacaacgagcagcttgaggcgggagacaacccctacctcaagtacaaccacgcggacgccgagtttcaggagaagctcgccgacgacacatccttcgggggaaacctcggaaaggcagtctttcaggccaagaaaagggttctcgaaccttttggcctggttgaagagggtgctaagacggcccctaccggaaagcggatagacgaccactttccaaaaagaaagaaggcccggaccgaagaggactccaagccttccacctcgtcagacgccgaagctggacccagcggatcccagcagctgcaaatcccagcccaaccagcctcaagtttgggagctgatacaatgtctgcgggaggtggcggcccattgggcgacaataaccaaggtgccgatggagtgggcaatgcctcgggagattggcattgcgattccacgtggatgggggacagagtcgtcaccaagtccacccgaacctgggtgctgcccagctacaacaaccaccagtaccgagagatcaaaagcggctccgtcgacggaagcaacgccaacgcctactttggatacagcaccccctgggggtactttgactttaaccgcttccacagccactggagcccccgagactggcaaagactcatcaacaactactggggcttcagaccccggtccctcagagtcaaaatcttcaacattcaagtcaaagaggtcacggtgcaggactccaccaccaccatcgccaacaacctcacctccaccgtccaagtgtttacggacgacgactaccagctgccctacgtcgtcggcaacgggaccgagggatgcctgccggccttccctccgcaggtctttacgctgccgcagtacggttacgcgacgctgaaccgcgacaacacagaaaatcccaccgagaggagcagcttcttctgcctagagtactttcccagcaagatgctgagaacgggcaacaactttgagtttacctacaactttgaggaggtgcccttccactccagcttcgctcccagtcagaacctcttcaagctggccaacccgctggtggaccagtacttgtaccgcttcgtgagcacaaataacactggcggagtccagttcaacaagaacctggccgggagatacgccaacacctacaaaaactggttcccggggcccatgggccgaacccagggctggaacctgggctccggggtcaaccgcgccagtgtcagcgccttcgccacgaccaataggatggagctcgagggcgcgagttactaggtgcccccgcagccgaacggcatgaccaacaacctccagggcagcaacacctatgccctggagaacactatgatcttcaacagccagccggcgaacccgggcaccaccgccacgtacctcgagggcaacatgctcatcaccagcgagagcgagacgcagccggtgaaccgcgtggcgtacaacgtcggcgggcagatggccaccaacaaccagagctccaccactgcccccgcgaccggcacgtacaacctccaggaaatcgtgcccggcagcgtgtggatggagggggacgtgtacctccaaggacccatctgggccaagatcccagagacgggggcgcactttcacccctctccggccatgggcggattcggactcaagcacccaccgcccatgatgctcatcaagaacacgcctgtgcccggaaatatcaccagcttctcggacgtgcccgtcagcagcttcatcacccagtacagcaccgggcaggtcaccgtggagatggagtgggagctcaagaaggaaaactccaagaggtggaacccagagatccagtacacaaacaactacaacgacccccagtttgtggactttgccccggacagcaccggggaatacagaaccaccagacctatcggaacccgataccttacccgacccctttaa

SEQ ID NO: 792 - DNA, 2175 bp, Artificial Sequence
  Description of Artificial Sequence: Synthetic polynucleotide
atgtcttttgttgatcaccctccagattggttggaagaagttggtgaaggtcttcgcgagtttttgggccttgaagcgggcccaccgaaaccaaaacccaatcagcagcatcaagatcaagcccgtggtcttgtgctgcctggttataactatctcggacccggaaacggtctcgatcgaggagagcctgtcaacagggcagacgaggtcgcgcgagagcacgacatctcgtacaacgagcagcttgaggcgggagacaacccctacctcaagtacaaccacgcggacgccgagtttcaggagaagctcgccgacgacacatccttcgggggaaacctcggaaaggcagtctttcaggccaagaaaagggttctcgaaccttttggcctggttgaagagggtgctaagacggcccctaccggaaagcggatagacgaccactttccaaaaagaaagaaggtccggaccgaagaggactccaagccttccacctcgtcagacgccgaagctggacccagcggatcccagcagctgcaaatcccagcccaaccagcctcaagtttgggagctgatacaatgtctgcgggaggtggcggcccattgggcgacaataaccaaggtgccgatggagtgggcaatgcctcgggagattggcattgcgattccacgtggatgggggacagagtcgtcaccaagtccacccgaacctgggtgctgcccagctacaacaaccaccagtaccgagagatcaaaagcggctccgtcgacggaagcaacgccaacgcctactttggatacagcaccccctgggggtactttgactttaaccgcttccacagccactggagcccccgagactggcaaagactcatcaacaactactggggcttcagaccccggtccctcagagtcaaaatcttcaacattcaagtcaaagaggtcacggtgcaggactccaccaccaccatcgccaacaacctcacctccaccgtccaagtgtttacggacgacgactaccagctgccctacgtcgtcggcaacgggaccgagggatgcctgccggccttccctccgcaggtctttacgctgccgcagtacggttacgcgacgctgaaccgcgacaacacagaaaatcccaccgagaggagcagcttcttctgcctagagtactttcccagcaagatgctgagaacgggcaacaactttgagtttacctacaactttgaggaggtgcccttccactccagcttcgctcccagtcagaacctcttcaagctggccaacccgctggtggaccagtacttgtaccgcttcgtgagcacaaataacactggcggagtccagttcaacaagaacctggccgggagatacgccaacacctacaaaaactggttcccggggcccatgggccgaacccagggctggaacctgggctccggggtcaaccgcgccagtgtcagcgccttcgccacgaccaataggatggagctcgagggcgcgagttaccaggtgcccccgcagccgaacggcatgaccaacaacctccagggcagcaacacctatgccctggagaacactatgatcttcaacagccagccggcgaacccgggcaccaccgccacgtacctcgagggcaacatgctcatcaccagcgagagcgagacgcagccggtgaaccgcgtggcgtacaacgtcggcgggcagatggccaccaacaaccagagctccaccactgcccccgcgaccggcacgtacaacctccaggaaatcgtgcccggcagcgtgtggatggagagggacgtgtacctccaaggacccatctgggccaagatcccagagacgggggcgcactttcacccctctccggccatgggcggattcggactcaaacacccaccgcccatgatgctcatcaagaacacgcctgtgcccggaaatatcaccagcttctcggacgtgcccgtcagcagcttcatcacccagtacagcaccgggcaggtcaccgtggagatggagtgggagctcaagaaggaaaactccgagaggtggaacccagagatccagtacacaaacaactacaacgacccccagtttgtggactttgccccggacagcaccggggaatacagaaccaccagacctattggaacccgataccttacccgacccctttaa

SEQ ID NO: 793 - DNA, 2175 bp, Artificial Sequence
  Description of Artificial Sequence: Synthetic polynucleotide
atgtcttttgttgatcaccctccagattggttggaagaagttggtgaaggtcttcgcgagtttttgggccttgaagcgggcccaccgaaaccaaaacccaatcagcagcatcaagatcaagcccgtggtcttgtgctgcctggttataactatctcggacccggaaacggtctcgatcgaggagagcctgtcaacagggcagacgaggtcgcgcgagagcacgacatctcgtacagcgagcagcttgaggcgggagacaacccctacctcaagtacaaccacgcggacgccgagtttcaggagaagctcgccgacgacacatccttcgggggaaacctcggaaaggcagtctttcaggccaagaaaagggttctcgaaccttttggcctggttgaagagggtgctaagacggcccctaccggaaagcggatagacgaccactttccaaaaagaaagaaggcccggaccgaagaggactccaagccttccacctcgtcagacgccgaagctggacccagcggatcccagcagctgcaaatcccagcccaaccagcctcaagtttgggagctgatacaatgtctgcgggaggtggcggcccattgggcgacaataaccaaggtgccgatggagtgggcaatgcctcgggagattggcattgcgattccacgtggatgggggacagagtcgtcaccaagtccacccgaacctgggtgctgcccagctacaacaaccaccagtaccgagagatcaaaagcggctccgtcgacggaagcaacgccaacgcctactttggatacagcaccccctgggggtactttgactttaaccgcttccacagccactggagcccccgagactggcaaagactcatcaacaactactggggcttcagaccccggtccctcagagtcaaaatcttcaacattcaagtcaaagaggtcacggtgcaggactccaccaccaccatcgccaacaacctcacctccaccgtccaagtgtttacggacgacgactaccagctgccctacgtcgtcggcaacgggaccgagggatgcctgccggccttccctccgcaggtctttacgctgccgcagtacggttacgcgacgctgaaccgcgacaacacagaaaatcccaccgagaggagcagcttcttctgcctagagtactttcccagcaagatgctgagaacgggcaacaactttgagtttacctacaactttgaggaggtgcccttccactccagcttcgctcccagtcagaacctcttcaagctggccaacccgctggtggaccagtacttgtaccgcttcgtgagcacaaataacactggcggagtccagttcaacaagaacctggccgggagatacgccaacacctacaaaaactggttcccggggcccatgggccgaacccagggctggaacctgggctccggggtcaaccgcgccagtgtcagcgccttcgccacgaccaataggatggagctcgagggcgcgagttaccaggtgcccccgcagccgaacggcatgaccaacaacctccagggcagcaacacctatgccctggagaacactatgatcttcaacagccagccggcgaacccgggcaccaccgccacgtacctcgagggcaacatgctcatcaccagcgagagcgagacgcagccggtgaaccgcgtggcgtacaacgtcggcgggcagatggccaccaacaaccagagctccaccactgcccccgcgaccggcacgtacaacctccaggaaatcgtgcccggcagcgtgtggatggagagggacgtgtacctccaaggacccatctgggccaagatcccagagacgggggcgcactttcacccctctccggccatgggcggattcggactcaaacacccaccgcccatgatgctcatcaagaacacgcctgtgcccggaaatatcaccagcttctcggacgtgcccgtcagcagcttcatcacccagtacagcaccgggcaggtcaccgtggagatggagtgggagctcaagaaggaaaactccaagaggtggaacccagagatccagtacacaaacaactacaacgacccccagtttgtggactttgccccggacagcaccggggaatacagaaccgccagacctatcggaacccgataccttacccgacccctttaa

SEQ ID NO: 794 - DNA, 2175 bp, Artificial Sequence
  Description of Artificial Sequence: Synthetic polynucleotide
atgtcttttgttgatcaccctccagattggttggaagaagttggtgaaggtcttcgcgagtttttgggccctgaagcgggcccaccgaaaccaaaacccaatcagcagcatcaagatcaagcccgtggtcttgtgctgcctggttataactatctcggacccggaaacggtctcgatcgaggagagcctgtcaacagggcagacgaggtcgcgcgagagcacgacatctcgtacaacgagcagcttgaggcgggagacaacccctacctcaagtacaaccacgcggacgccgagtttcaggagaagctcgccgacgacacatccttcgggggaaacctcggaaaggcagtctttcaggccaagaaaagggttctcgaaccttttggcctggttgaagagggtgctaagacggcccctaccggaaagcggatagacgaccactttccaaaaagaaagaaggcccggaccgaagaggactccaagccttccacctcgtcagacgccgaagctggacccagcggatcccagcagctgcaaatcccagcccaaccagcctcaagtttgggagctgatacaatgtctgcgggaggtggcggcccattgggcgacaataaccaaggtgccgatggagtgggcaatgcctcgggagattggcattgcgattccacgtggatgggggacagagtcgtcaccaagtccacccgaacctgggtgctgcccagctacaacaaccaccagtaccgagagatcaaaagcggctccgtcgacggaagcaacgccaacgcctactttggatacagcaccccctgggggtactttgactttaaccgcttccacagccactggagcccccgagactggcaaagactcatcaacaactactggggcttcagaccccggtccctcagagtcaaaatcttcaacattcaagtcaaagaggtcacggtgcaggactccaccaccaccatcgccaacaacctcacctccaccgtccaagtgtttacggacgacgactaccagctgccctacgtcgtcggcaacgggaccgagggatgcctgccggccttccctccgcaggtctttacgctgccgcagtacggttacgcgacgctgaaccgcgacaacacagaaaatcccaccgagaggagcagcttcttctgcctagagtactttcccagcaagatgctgagaacgggcaacaactttgagtttacctacaactttgaggaggtgcccttccactccagcttcgctcccagtcagaacctcttcaagctggccaacccgctggtggaccagtacttgtaccgcttcgtgagcacaaataacactggcggagtccagttcaacaagaacctggccgggagatacgccaacacctacaaaaactggttcccggggcccatgggccgaacccagggctggaacctgggctccggggtcaaccgcgccagtgtcagcgccttcgccacgaccaataggatggagctcgagggcgcgagttaccaggtgcccccgcagccgaacggcatgaccaacaacctccagggcagcaacacctatgccctggagaacactatgatcttcaacagccagccggcgaacccgggcaccaccgccacgtacctcgagggcaacatgctcatcaccagcgagagcgagacgcagccggtgaaccgcgtggcgtacaacgtcggcgggcagatgaccaccaacaaccagagctccaccactgcccccgcgaccggcacgtacaacctccaggaaatcgtgcccggcagcgtgtggatggagagggacgtgtacccccaaggacccatctgggccaagatcccagagacgggggcgcactttcacccctctccggccatgggcggattcggactcaaacacccaccgcccatgatgctcatcaagaacacgcctgtgcccggaaatatcaccagcttctcggacgtgcccgtcagcagcttcatcacccagtacagcaccgggcaggtcaccgtggagatggagtgggagctcaagaaggaaaactccaagaggtggaacccagagatccagtacacaaacaactacaacgacccccagtttgtggactttgccccggacagcaccggggaatacaggaccaccagacctatcggaacccgataccttacccgacccctttaa

SEQ ID NO: 795 - DNA, 2175 bp, Artificial Sequence
  Description of Artificial Sequence: Synthetic polynucleotide
atgtcttttgttgatcaccctccagattggttggaagaagttggtgaaggtcttcgcgagtttttgggccttgaagcgggcccaccgaaaccaaaacccaatcagcagcatcaagatcaagcccgtggtcttgtgctgcctggttataactatctcggacccggaaacggtctcgatcgaggagagcctgtcaacagggcagacgaggtcgcgcgagagcacgacatctcgtacaacgagcagcttgaggcgggagacaacccctacctcaagtacaaccacgcggacgccgagtttcaggagaagctcgccgacgacacatccttcgggggaaacctcggaaaggcagtctttcaggccaagaaaagggttctcgaaccttttggcctggttgaagagggtgctaagacggcccctaccggaaagcggatagacgaccactttccaaaaagaaagaaggcccggaccgaagaggactccaagccttccacctcgtcagacgccgaagctggacccagcggatcccagcagctgcaaatcccagcccaaccagcctcaagtttgggagctgatacaatgtctgcgggaggtggcggcccattgggcgacaataaccaaggtgccgatggagtgggcaatgcctcgggagattggcattgcgattccacgtggatgggggacagagtcgtcaccaagtccacccgaacctgggtgctgcccagctacaacaaccaccagtaccgagagatcaaaagcggctccgtcgacggaagcaacgccaacgcctactttggatacagcaccccctgggggtactttgactttaaccgcttccacagccactggagcccccgagactggcaaagactcatcaacaactactggggcttcagaccccggtccctcagagtcaaaatcttcaacattcaagtcaaagaggtcacggtgcaggactccaccaccaccatcgccaacaacctcacctccaccgtccaagtgtttacggacgacgactaccagctgccctacgtcgtcggcaacgggaccgagggatgcctgccggccttccctccgcaggtctttacgctgccgcagtacggttacgcgacgctgaaccgcgacaacacagaaaatcccaccgagaggagcagcttcctctgcctagagtactttcccagcaagatgctgagaacgggcaacaactttgagtttacctacaactttgaggaggtgcccttccactccagcttcgctcccagtcagaacctcttcaagctggccaacccgctggtggaccagtacttgtaccgcttcgtgagcacaaataacactggcggagtccagttcaacaagaacctggccgggagatacgccaacacctacaaaaactggttcccggggcccatgggccgaacccagggctggaacctgggctccggggtcaaccgcgccagtgtcagcgccttcgccacgaccaataggatggagctcgagggcgcgagttaccaggtgcccccgcagccgaacggcatgaccaacaacctccagggcagcaacacctatgccctggagaacactatgatcttcaacagccagccggcgaacccgggcaccaccgccacgtacctcgagggcaacatgctcatcaccagcgagagcgagacgcagccggtgaaccgcgtggcgtacaacgtcggcgggcagatggccaccaacaaccagagctccaccactgcccccgcgaccggcacgtacaacctccaggaaatcgtgcccggcagcgtgtggatgaagagggacgtgtacctccaaggacccatctgggccaagatcccagagacgggggcgcactttcacccctctccggccatgggcggattcggactcaaacacccaccgcccatgatgctcatcaagaacacgcctgtgcccggaaatatcaccagcttctcggacgtgcccgtcagcagcttcatcacccagtacagcaccgggcaggtcaccgtggagatggagtgggagctcaagaaggaaaactccaagaggtggaacccagagatccagtacacaaacaactacaacgacccccagtttgtggactttgccccggacagcaccggggaatacagaaccaccagacctatcggaacccgataccttacccgacccctttaa

SEQ ID NO: 796 - DNA, 2175 bp, Artificial Sequence
  Description of Artificial Sequence: Synthetic polynucleotide
atgtcttttgttgatcaccctccagattggttggaagaagttggtgaaggtcttcgcgagtttttgggccttgaggcgggcccaccgaaaccaaaacccaatcagcagcatcaagatcaagcccgtggtcttgtgctgcctggttataactatctcggacccggaaacggtctcgatcgaggagagcctgtcaacagggcagacgaggtcgcgcgagagcacgacatctcgtacaacgagcagcttgaggcgggagacaacccctacctcaagtacaaccacgcggacgccgagtttcaggagaagctcgccgacgacacatccttcgggggaaacctcggaaaggcagtctttcaggccaagaaaagggttctcgaaccttttggcctggttgaagagggtgctaagacggcccctaccggaaagcggatagacgaccactttccaaaaagaaagaaggcccggaccgaagaggactccaagccttccaccccgtcagacgccgaagctggacccagcggatcccagcagctgcaaatcccagcccaaccagcctcaagtttgggagctgatacaatgtctgcgggaggtggcggcccattgggcgacaataaccaaggtgccgatggagtgggcaatgcctcgggagattggcattgcgattccacgtggatgggggacagagtcgtcaccaagtccacccgaacctgggtgctgcccagctacaacaaccaccagtaccgagagatcaaaagcggctccgtcgacggaagcaacgccaacgcctactttggatacagcaccccctgggggtactttgactttaaccgcttccacagccactggagcccccgagactggcaaagactcatcaacaactactggggcttcagaccccggtccctcagagtcaaaatcttcaacattcaagtcaaagaggtcacggtgcaggactccaccaccaccatcgccaacaacctcacctccaccgtccaagtgtttacggacgacgactaccagctgccctacgtcgtcggcaacgggaccgagggatgcctgccggccttccctccgcaggtctttacgctgccgcagtacggttacgcgacgctgaaccgcgacaacacagaaaatcccaccgagaggagcagcttcttctgcctagagtactttcccagcaagatgctgagaacgggcaacaactttgagtttacctacaactttgaggaggtgcccttccactccagcttcgctcccagtcagaacctcttcaagctggccaacccgctggtggaccagtacttgtaccgcttcgtgagcacaaataacactggcggagtccagttcaacaagaacctggccgggagatacgccaacacctacaaaaactggttcccggggcccatgggccgaacccagggctggaacctgggctccggggtcaaccgcgccagtgtcagcgccttcgccacgaccaataggatggagctcgagggcgcgagttaccaggtgcccccgcagccgaacggcatgaccaacaacctccagggcagcaacacctatgccctggagaacactatgatcttcaacagccagccggcgaacccgggcaccaccgccacgtacctcgagggcaacatgctcatcaccagcgagagcgagacgcagccggtgaaccgcgtggcgtacaacgtcggcgggcagatggccaccaacaaccagagctccaccactgcccccgcgaccggcacgtacaacctccaggaaatcgtgcccggcagcgtgtggatggagagggacgtgtacctccaaggacccatctgggccaagatcccagagacgggggcgcactttcacccctctccggccatgggcggattcggactcaaacacccaccgcccatgatgctcatcaagaacacgcctgtgcccggaaatatcaccagcttctcggacgtgcccgtcagcagcttcatcacccagtacagcaccgggcaggtcaccgtggagatggagtgggagctcaagaaggaaaactccaagaggtggaacccagagatccagtacacaaacaactacaacgacccccagtttgtggactttgccccggacagcaccggggaatacagaaccaccagacctatcggaacccgataccttacccgacccctttaa

SEQ ID NO: 797 - DNA, 2175 bp, Artificial Sequence
  Description of Artificial Sequence: Synthetic polynucleotide
atgtcttttgttgatcaccctccagattggttggaagaagttggtgaaggtcttcgcgagtttttgggccttgaagcgggcccaccgaaaccaaaacccaatcagcagcatcaagatcaagcccgtggtcttgtgctgcctggttataactatctcggacccggaaacggtctcgatcgaggagagcctgtcaacagggcagacgaggtcgcgcgagagcacgacatctcgtacaacgagcagcttgaggcgggagacaacccctacctcaagtacaaccacgcggacgccgagtttcaggagaagctcgccgacgacacatccttcgggggaaacctcggaaaggcagtctttcaggccaagaaaagggttctcgaaccttttggcctggttgaagagggtgctaagacggcccctaccggaaagcggatagacgaccactttccaaaaagaaagaaggcccggaccgaagaggactccaagccttccacctcgtcagacgccgaagctggacccagcggatcccagcagctgcaaatcccagcccaaccagcctcaagtttgggagctgatacaatgtctgcgggaggtggcggcccattgggcgacaataaccaaggtgccgatggagtgggcaatgcctcgggagattggcattgcgattccacgtggatgggggacagagtcgtcaccaagtccacccgaacctgggtgctgcccagctacaacaaccaccagtaccgagagatcaaaagcggctccgtcgacggaagcaacgccaacgcctactttggatacagcaccccctgggggtactttgactttaaccgcttccacagccactggagcccccgagactggcaaagactcatcaacaactactggggcttcagaccccggtccctcagagtcaaaatcttcaacattcaagtcaaagaggtcacggtgcaggactccaccaccaccatcgccaacaacctcacctccaccgtccaagtgtttacggacgacgactaccagctgccctacgtcgtcggcaacgggaccgagggatgcctgccggccttccctccgcaggtctttacgctgccgcagtacggttacgcgacgctgaaccgcgacaacacagaaaatcccaccgagaggagcagcttcttctgcctagagtactttcccagcaagatgctgagaacgggcaacaactttgagtttacctacaactttgaggaggtgcccttccactccagcttcgctcccagtcagaacctcttcaagctggccaacccgctggtggaccagtacttgtaccgcttcgtgagcacaaataacactggcggagtccagttcaacaagaacctggccgggagatacgccaacacccacaaaaactggttcccggggcccatgggccgaacccagggctggaacctgggctccggggtcaaccgcgccagtgtcagcgccttcgccacgaccaataggatggagctcgagggcgcgagttaccaggtgcccccgcagtcgaacggcatgaccaacaacctccggggcagcaacacctatgccctggagaacactatgatcttcaacagccagccggcgaacccgggcaccaccgccacgtacctcgagggcaacatgctcatcaccagcgagagcgagacgcagccggtgaaccgcgtggcgtacaacgtcggcgggcagatggccaccaacaaccagagctccaccactgcccccgcgaccggcacgtacaacctccaggaaatcgtgcccggcagcgtgtggatggagagggacgtgtacctccaaggacccatctgggccaagatcccagagacgggggcgcactttcacccctctccggccatgggcggattcggactcaaacacccaccgcccatgatgctcatcaagaacacgcctgtgcccggaaatatcaccagcttctcggacgtgcccgtcagcagcttcatcacccagtacagcaccgggcaggtcaccgtggagatggagtgggagctcaagaaggaaaactccaagaggtggaacccagagatccagtacacaaacaactacaacgacccccagtttgtggactttgccccggacagcaccggggaatacagaaccaccagacctatcggaacccgataccttacccgacccctttaa

SEQ ID NO: 798 - DNA, 2175 bp, Artificial Sequence
  Description of Artificial Sequence: Synthetic polynucleotide
atgtcttttgttgatcaccctccagattggttggaagaagttggtgaaggtcttcgcgagtttttgggccttgaagcgggcccaccgaaaccaaaacccaatcagcagcatcaagatcaagcccgtggtcttgtgctgcctggttataactatctcggacccggaaacggtctcgatcgaggagagcctgtcaacagggcagacgaggtcgcgcgagagcacgacatctcgtacaacgagcagcttgaggcgggagacaacccctacctcaagtacaaccacgcggacgccgagtttcaggagaagctcgccgacgacacatccttcgggggaaacctcggaaaggcagtctttcaggccaagaaaagggttctcgaaccttttggcctggttgaagagggtgctaagacggcccctaccggaaagcggatagacgaccactttccaaaaagaaagaaggcccggaccgaagaggactccaagccttccacctcgtcagacgccgaagctggacccagcggatcccagcagctgcaaatcccagcccaaccagcctcaagtttgggagctgatacaatgtctgcgggaggtggcggcccattgggcgacaataaccaaggtgccgatggagtgggcaatgcctcgggagattggcattgcgattccacgtggatgggggacagagtcgtcaccaagtccacccgaacctgggtgctgcccagctacaacaaccaccagtaccgagagatcaaaagcggctccgtcgacggaagcaacgccaacgcctactttggatacagcaccccctgggggtactttgactttaaccgcttccacagccactggagcccccgagactggcaaagactcatcaacaactactggggcttcagaccccggtccctcagagtcaaaatcttcaacattcaagtcaaagaggtcacggtgcaggactccaccaccaccatcgccaacaacctcacctccaccgtccaagtgtttacggacgacgactaccagctgccctacgtcgtcggcaacgggaccgagggatgcctgccggccttccctccgcaggtctttacgctgccgcagtacggttacgcgacgctgaaccgcgacaacacagaaaatcccaccgagaggagcagcttcttctgcctagagtactttcccagcaagatgctgagaacgggcaacaactttgagtttacctacaactttgaggaggtgcccttccactccagcttcgctcccagtcagaacctcttcaagctggccaacccgctggtggaccagtacttgtaccgcttcgtgagcacaaataacactggcggagtccagttcaacaagaacctggccgggagatacgccaacacctacaaaaactggttcccggggcccatgggccgaacccagggctggaacctgggctccggggtcaaccgcgccagtgtcagcgccttcgccacgaccaataggatggagctcgagggcgcgagttaccaggtgcccccgcagccgaacggcatgaccaacaacctccagggcagcaacacctatgccctggagaacactatgatcttcaacagccagccggcgaacccgggcaccaccgccacgtacctcgagggcaacatgctcatcaccagcgagagcgagacgcagccggtgaaccgcgtggcgtacagcgtcggcgggcagatggccaccaacaaccagagctccaccactgcccccacgaccggcacgtacaacctccaggaaatcgtgcccggcagcgtgtggatggagagggacgtgtacctccaaggacccatctgggccaagatcccagagacgggggcgcactttcacccctctccggccatgggcggattcagactcaaacacccaccgcccatgatgctcatcaagaacacgcctgtgcccggaaatatcaccagcttctcggacgtgcccgtcagcagcttcatcacccagtacagcaccgggcaggtcaccgtggagatggagtgggagctcaagaaggaaaactccaagaggtggaacccagagatccagtacacaaacaactacaacgacccccagtttgtggactttgccccggacagcaccggggaatacagaaccaccagacctatcggaacccgataccttacccgacccctttaa

SEQ ID NO: 799 - DNA, 2175 bp, Artificial Sequence
  Description of Artificial Sequence: Synthetic polynucleotide
atgtcttttgttgatcaccctccagattggttggaagaagttggtgaaggtcttcgcgagtttttgggccttgaagcgggcccaccgaaaccaaaacccaatcagcagcatcaagatcaagcccgtggtcttgtgctgcctggttataactatctcggacccggaaacggtctcgatcgaggagagcctgtcaacagggcagacgaggtcgcgcgagagcacgacatctcgtacaacgagcagcttgaggcgggagacaacccctacctcaagtacaaccacgcggacgccgagtttcaggagaagctcgccgacgacacatccttcgggggaaacctcggaaaggcagtctttcaggccaagaaaagggttctcgaaccttttggcctggttgaagagggtgctaagacggcccctaccggaaagcggatagacgaccactttccaaaaagaaagaaggcccggaccgaagaggactccaagccttccacctcgtcagacgccgaagctggacccagcggatcccagcagctgcaaatcccagcccaaccagcctcaagtttgggagctgatacaatgtctgcgggaggtggcggcccattgggcgacaataaccaaggtgccgatggagtgggcaatgcctcgggagattggcattgcgattccacgtggatgggggacagagtcgtcaccaagtccacccgaacctgggtgctgcccagctacaacaaccaccagtaccgagagatcaaaagcggctccgtcgacggaagcaacgccaacgcctactttggatacagcaccccctgggggtactttgactttaaccgcttccacagccactggagcccccgagactggcaaagactcatcaacaactactggggcttcagaccccggtccctcagagtcaaaatcttcaacattcaagtcaaagaggtcacggtgcaggactccaccaccaccatcgccaacaacctcacctccaccgtccaagtgtttacggacgacgactaccagctgccctacgtcgtcggcaacgggaccgagggatgcctgccggccttccctccgcaggtctttacgctgccgcagtacggttacgcgacgctgaaccgcgacaacacagaaaatcccaccgagaggagcagcttcttctgcctagagtactttcccagcaagatgctgagaacgggcaacaactttgagtttacctacaactttgaggaggtgcccttccactccagcttcgctcccagtcagaacctcttcaagctggccaacccgctggtggaccagtacttgtaccgcttcgtgagcacaaataacactggcggagtccagttcaacaagaacctggccgggagatacgccaacacctacaaaaactggttcccggggcccatgggccgaacccagggctggaacctgggctccggggtcaaccgcgccagtgtcagcgccttcgccgcgaccaataggatggagctcgagggcgcgagttaccaggtgcccccgcagccgaacggcatgaccaacaacctccagggcagcaacacctatgccctggagaacactatgatcttcaacagccagccggcgaacccgggcaccaccgccacgtacctcgagggcaacatgctcatcaccagcgagagcgagacgcagccggtgaaccgcgtggcgtacaacgtcggcgggcagatggccaccaacaaccagagctccaccactgcccccgcgaccggcacgtacaacctccaggaaatcgtgcccggcggcgtgtggatggagagggacgtgtacctccaaggacccatctgggccaagatcccagagacgggggcgcactttcacccctctccggccatgggcggattcggactcaaacacccaccgcccatgatgctcatcaagaacacgcctgtgcccggaaataccaccagcttctcggacgtgcccgtcagcagcttcatcacccagtacagcaccgggcaggtcaccgtggagatggagtgggagctcaagaaggaaaactccaagaggtggaacccagagatccagtacacaaacaactacaacgacccccagtttgtggactttgccccggacagcaccggggaatacagaaccaccagacctatcggaacccgataccttacccgacccctttaa

SEQ ID NO: 800 - DNA, 2175 bp, Artificial Sequence
  Description of Artificial Sequence: Synthetic polynucleotide
atgtcttttgttgatcaccctccagattggttggaagaagttggtgaaggtcttcgcgagtttttgggccttgaagcgggcccaccgaaaccaaaacccaatcagcagcatcaagatcaagcccgtggtcttgtgctgcctggttataactatctcggacccggaaacggtctcgatcgaggagagcctgtcaacagggcagacgaggtcgcgcgagagcacgacatctcgtacaacgagcagcttgaggcgggagacaacccctacctcaagtacaaccacgcggacgccgagtttcaggagaagctcgccgacgacacatccttcgggggaaacctcggaaaggtagtctttcaggccaagaaaagggttctcgaaccttttggcctggttgaagagggtgctaagacggcccctaccggaaagcggatagacgaccactttccaaaaagaaagaaggcccggaccgaagaggactccaagccttccacctcgtcagacgccgaagctggacccagcggatcccagcagctgcaaatcccagcccaaccagcctcaagtttgggagctgatacaatgtctgcgggaggtggcggcccattgggcggcaataaccaaggtgccgatggagtgggcaatgcctcgggagattggcattgcgattccacgtggatgggggacagagtcgtcaccaagtccacccgaacctgggtgctgcccagctacaacaaccaccagtaccgagagatcaaaagcggctccgtcgacggaagcaacgccaacgcctactttggatacagcaccccctgggggtactttgactttaaccgcttccacagccactggggcccccgagactggcaaagactcatcaacaactactggggcttcagaccccggtccctcagagtcaaaatcttcaacattcaagtcaaagaggtcacggtgcaggactccaccaccaccatcgccaacaacctcacctccaccgtccaagtgtttacggacgacgactaccagctgccctacgtcgtcggcaacgggaccgagggatgcctgccggccttccctccgcaggtctttacgctgccgcagtacggttacgcgacgctgaaccgcgacaacacagaaaatcccaccgagaggagcagcttcttctgcctagagtactttcccagcaagatgctgagaacgggcaacaactttgagtttacctacaactttgaggaggtgcccttccactccagcttcgctcccagtcagaacctcttcaagctggccaacccgctggtggaccagtacttgtaccgcttcgtgagcacaaataacactggcggagtccagttcaacaagaacctggccgggagatacgccaacacctacaaaaactggttcccggggcccatgggccgaacccagggctggaacctgggctccggggtcaaccgcgccagtgtcagcgccctcgccacgaccaataggatggagctcgagggcgcgagttaccaggtgcccccgcagccgaacggcatgaccaacaacctccagggcagcaacacctatgccctggagaacactatgatcttcaacagccagccggcgaacccgggcaccaccgccacgtacctcgagggcaacatgctcatcaccagcgagagcgagacgcagccggtgaaccgcgtggcgtacaacgtcggcgggcagatggccaccaacaaccagagctccaccactgcccccgcgaccggcacgtacaacctccaggaaatcgtgcccggcagcgtgtggatggagagggacgtgtacctccaaggacccatctgggccaagatcccagagacgggggcgcactttcacccctctccggccatgggcggattcggactcaaacacccaccgcccatgatgctcatcaagaacacgcctgtgcccggaaatatcaccagcttctcggacgtgcccgtcagcagcttcatcacccagtacagcaccgggcaggtcaccgtggagatggagtgggagctcaagaaggaaaactccaagaggtggaacccagagatccagtacacaaacaactacaacgacccccagtttgtggactttgccccggacagcaccggggaatacagaaccaccagacctatcggaacccgataccttacccgacccctttaa

SEQ ID NO: 801 - DNA, 2175 bp, Artificial Sequence
  Description of Artificial Sequence: Synthetic polynucleotide
atgtcttttgttgatcaccctccagattggttggaagaagttggtgaaggtcttcgcgagtttttgggccttgaagcgggcccaccgaaaccaaaacccaatcagcagcatcaagatcaagcccgtggtcttgtgctgcctggttataactatctcggacccggaaacggtctcgatcgaggagagcctgtcaacagggcagacgaggtcgcgcgagagcacgacatctcgtacaacgagcagcttgaggcgggagacaacccctacctcaagtacaaccacgcggacgccgagtttcaggagaagctcgccgacgacacatccttcgggggaaacctcggaaaggcagtctttcaggccaagaaaagggttctcgaaccttttggcctggttgaagagggtgctaagacggcccctaccggaaagcggatagacgaccactttccaaaaagaaagaaggcccggaccgaagaggactccaagccttccacctcgtcagacgccgaagctggacccagcggatcccagcagctgcaaatcccagcccaaccagcctcaagtttgggagctgatacaatgtctgcgggaggtggcggcccattgggcgacaataaccaaggtgccgatggagtgggcaatgcctcgggagattggcattgcgattccacgtggatgggggacagagtcgtcaccaagtccacccgaacctgggtgctgcccagctacaacaaccaccagtaccgagagatcaaaagcggctccgtcgacggaagcaacgccaacgcctactttggatacagcaccccctgggggtactttgactttaaccgcttccacagccactggagcccccgagactggcaaagactcatcaacaactactggggcttcagaccccggtccctcagagtcaaaatcttcaacattcaagtcaaagaggtcacggtgcaggactccaccaccaccatcgccaacaacctcacctccaccgtccaagtgtttacggacgacgactaccagctgccctacgtcgtcggcaacgggaccgagggatgcctgccggccttccctccgcaggtctttacgctgccgcagtacggttacgcgacgctgaaccgcgacaacacagaaaatcccaccgagaggagcagcttcttctgcctagagtactttcccagcaagatgctgagaacgggcaacaactttgagtttacctacaactttgaggaggtgcccttccactccagcttcgctcccagtcagaacctcttcaagctggccaacccgctggtggaccagtacttgtaccgcttcgtgagcacaaataacactggcggagtccagttcaacaagaacctggccgggagatacgccaacacctacaaaaactggttcccggggcccatgggccgaacccagggctggaacctgggctccggggtcaaccgcgccagtgtcagcgccttcgccacgaccaataggatggagctcgagggcgcgagttaccaggtgcccccgcagccgaacggcatgaccaacaacctccagggcagcaacacctatgccctggagaacactatgatcttcaacagccagccggcgaacccgggcaccaccgccacgtacctcgagggcaacatgctcatcaccagcgagagcgagacgcagccggtgaaccgcgtggcgtacaacgtcggcgggcagatggccaccaacaaccagagctccaccactgcccccgcgaccggcacgtacaacctccaggaaatcgtgcccggcagcgtgtggatggagagggacgtgtacctccaaggacccatctgagccaagatcccagagacgggggcgcactttcacccctctccggccatgggcggattcggactcaaacacccaccgcccatgatgctcatcaagaacacgcctgtgcccggaaatatcaccagcttctcggacgtgcccgtcagcagcttcatcacccagtacagcaccgggcaggtcaccgtggagatggagtgggagctcaagaaggaaaactccaagaggtggaacccagagatccagtacacaaacaactacaacgacccccagtttgtggactttgccccggacagcaccggggaatgcagaaccaccagacctatcggaacccgataccttacccgacccctttaa

SEQ ID NO: 802 - DNA, 2175 bp, Artificial Sequence
  Description of Artificial Sequence: Synthetic polynucleotide
atgtcttttgttgatcaccctccagattggttggaagaagttggtgaaggtcttcgcgagtttttgggccttgaagcgggcccaccgaaaccaaaacccaatcagcagcatcaagatcaagcccgtggtcttgtgctgcctggttataactatctcggacccggaaacggtctcgatcgaggagagcctgtcaacagggcagacgaggtcgcgcgagagcacgacatctcgtacaacgagcagcttgaggcgggagacaacccctacctcaagtacaaccacgcggacgccgagtttcaggagaagctcgccgacgacacatccttcgggggaaacctcggaaaggcagtctttcaggccaagaaaagggttctcgaaccttttggcctggttgaagagggtgctaagacggcccctaccggaaagcggatagacgaccactttccaaaaagaaagaaggcccggaccgaagaggactccaagccttccacctcgtcagacgccgaagctggacccagcggatcccagcagctgcaaatcccagcccaaccagcctcaagtttgggagctgatacaatgtctgcgggaggtggcggcccattgggcgacaataaccaaggtgccgatggagtgggcaatgcctcgggagattggcattgcgattccacgtggatgggggacagagtcgtcaccaagtccacccgaacctgggtgctgcccagctacaacaaccaccagtaccgagagatcaaaagcggctccgtcgacggaagcaacgccaacgcctactttggatacagcaccccctgggggtactttgactttaaccgcttccacagccactggagcccccgagactggcaaagactcatcaacaactactggggcttcagaccccggtccctcagagtcaaaatcctcaacattcaagtcaaagaggtcacggtgcaggactccaccaccaccatcgccaacaacctcacctccaccgtccaagtgtttacggacgacgactaccagctgccctacgtcgtcggcaacgggaccgagggatgcctgccggccttccctccgcaggtctttacgctgccgcagtacggttacgcgacgctgaaccgcgacaacacagaaaatcccaccgagaggagcagcttcttctgcctagagtactttcccagcaagatgctgagaacgggcaacaactttgagtttacctacaactttgaggaggtgcccttccactccagcttcgctcccagtcagaacctcttcaagctggccaacccgctggtgggccagtacttgtaccgcttcgtgagcacaaataacactggcggagtccagttcaacgagaacctggccgggagatacgccaacacctacaaaaactggttcccggggcccatgggccgaacccagggctggaacctgggctccggggtcaaccgcgccagtgtcagcgccttcgccacgaccaataggatggagctcgagggcgcgagttaccaggtgcccccgcagccgaacggcatgaccaacaacctccagggcagcaacacctatgccctggagaacactatgatcttcaacagccagccggcgaacccgggcaccaccgccacgtacctcgagggcaacatgctcatcaccagcgagagcgagacgcagccggtgaaccgcgtggcgtacaacgtcggcgggcagatggccaccaacaaccagagctccaccactgcccccgcgaccggcacgtacaacctccaggaaatcgtgcccggcagcgtgtggatggagagggacgtgtacctccaaggacccatctgggccaagatcccagagacgggggcgcactttcacccctctccggccatgggcggattcggactcaaacacccaccgcccatgatgctcatcaagaacacgcctgtgcccggaaatatcaccagcttctcggacgtgcccgtcagcagcttcatcacccagtacagcaccgggcaggccaccgtggagatggagtgggagctcaagaaggaaaactccaagaggtggaacccagagatccagtacacaaacaactacaacgacccccagtttgtggactttgccccggacagcaccggggaatacagaaccaccagacctatcggaacccgataccttacccgacccctttaa

SEQ ID NO: 803 - DNA, 2175 bp, Artificial Sequence
  Description of Artificial Sequence: Synthetic polynucleotide
atgtcttttgttgatcaccctccagattggttggaagaagttggtgaaggtcttcgcgagtttttgggccttgaagcgggcccaccgaaaccaaaacccaatcagcagcatcaagatcaagcccgtggtcttgtgctgcctggttataactatctcggacccggaaacggcctcgatcgaggagagcctgtcaacagggcagacgaggtcgcgcgagagcacgacatctcgtacaacgagcagcttgaggcgggagacaacccctacctcaagtacaaccacgcggacgccgagtttcaggagaagctcgccgacgacacatccttcgggggaaacctcggaaaggcagtctttcaggccaagaaaagggttctcgaaccttttggcctggttgaagagggtgctaagacggcccctaccggaaagcggatagacgaccactttccaaaaagaaagaaggcccggaccgaagaggactccaagccttccacctcgtcagacgccgaagctggacccagcggatcccagcagctgcaaatcccagcccaaccagcctcaagtttgggagctgatacaatgtctgcgggaggtggcggcccattgggcgacaataaccaaggtgccgatggagtgggcaatgcctcgggagattggcattgcgattccacgtggatgggggacagagtcgtcaccaagtccacccgaacctgggtgctgcccagctacaacaaccaccagtaccgagagatcaaaagcggctccgtcgacggaagcaacgccaacgcctactttggatacagcaccccctgggggtactttgactttaaccgcttccacagccactggagcccccgagactggcaaagactcatcaacaactactggggcttcagaccccggtccctcagagtcaaaatcttcaacattcaagtcaaagaggtcacggtgcaggactccaccaccatcatcgccaacaacctcacctccaccgtccaagtgtttacggacgacgactaccagctgccctacgtcgtcggcaacgggaccgagggatgcctgccggccttccctccgcaggtctttacgctgccgcagtacggttacgcgacgctgaaccgcgacaacacagaaaatcccaccgagaggagcagcttcttctgcctagagtactttcccagcaagatgctgagaacgggcaacaactttgagtttacctacaactttgaggaggtgcccttccactccagcttcgcccccagtcagaacctcttcaagctggccaacccgctggtggaccagtacttgtaccgcttcgtgagcacaaataacactggcggagtccagttcaacaagaacctggccgggagatacgccaacacctacaaaaactggttcccggggcccatgggccgaacccagggctggaacctgggctccggggtcaaccgcgccagtgtcagcgccttcgccacgaccaataggatggagctcgagggcgcgagttaccaggtgcccccgcagccgaacggcatgaccaacaacctccagggcagcaacacctatgccctggagaacactatgatcttcaacagccagccggcgaacccgggcaccaccgccacgtacctcgagggcaacatgctcatcaccagcgagagcgagacgcagccggtgaaccgcgtggcgtacaacgtcggcgggcagatggccaccaacaaccagagctccaccactgcccccgcgaccggcacgtacaacctccaggaaatcgtgcccggcagcgtgtggatggagagggacgtgtacctccaaggacccatctgggccaagatcccagagacgggggcgcactttcacccctctccggccatgggcggattcggactcaaacacccaccgcccatgatgctcatcaagaacacgcctgtgcccggaaatatcaccagcttctcggacgtgcccgtcagcagcttcatcacccagtacagcaccgggcaggtcaccgtggagatggagtgggagctcaagaaggaaaactccaagaggtggaacccagagatccagtacacaaacaactacaacgacccccagtttgtggactttgccccggacagcaccggggaatacagaaccaccagacctatcggaacccgataccttacccgacccctttaa

SEQ ID NO: 804 - DNA, 2175 bp, Artificial Sequence
  Description of Artificial Sequence: Synthetic polynucleotide
atgtcttttgttgatcaccctccagattggttggaagaagttggtgaaggtcttcgcgagtttttgggccttgaagcgggcccaccgaaaccaaaacccaatcagcagcatcaagatcaagcccgtggtcttgtgctgcctggttataactatctcggacccggaaacggtctcgatcgaggagagcctgtcaacagggcagacgaggtcgcgcgagagcacgacatctcgtacaacgagcagcttgaggcgggagacaacccctacctcaagtacaaccacgcggacgccgagtttcaggagaagctcgccgacgacacatccttcgggggaaacctcggaaaggcagtctttcaggccaagaaaagggttctcgaaccttttggcctggttgaagagggtgctaagacggcccctaccggaaagcggatagacgaccactttccaaaaagaaagaaggcccggaccgaagaggactccaagccttccacctcgtcagacgccgaagctggacccagcggatcccagcagctgcaaatcccagcccaaccagcctcaagtttgggagctgatacaatgtctgcgggaggtggcggcccattgggcgacaataaccaaggtgccgatggagtgggcaatgcctcgggagattggcattgcgattccacgtggatgggggacagagtcgtcaccaagtccacccgaacctgggtgctgcccagctacaacaaccaccagtaccgagagatcaaaagcggctccgtcgacggaagcaacgccaacgcctactttggatacagcaccccctgggggtactttgactttaaccgcttccacagccactggagcccccgagactggcaaagactcatcaacaactactggggcttcagaccccggtccctcagagtcaaaatcttcaacattcaagtcaaagaggtcacggtgcaggactccaccaccaccatcgccaacaacctcacctccaccgtccaagtgtttacggacgacgactaccagctgccctacgtcgtcggcaacgggaccgagggatgcctgccggccttccctccgcaggtctttacgctgccgcagtacggttacgcgacgctgaaccgcgacaacacagaaaatcccaccgagaggagcagcttcttctgcctagagtactttcccagcaagatgctgagaacgggcaacaactttgagtttacctacaactttgaggaggtgcccttccactccagcttcgctcccagtcagaacctcttcaagctggccaacccgctggtggaccagtacttgtaccgcttcgtgagcacaaataacactggcggagtccagttcaacaagaacctggccgggagatacgccaacacctacaaaaactggttcccggggcccatgggccgaacccagggctggaacctgggctccggggtcaaccgcgccagtgtcagcgccttcgccacgaccaataggatggagctcgagggcgcgagttaccaggtgcccccgcagccgaacggcatgaccaacaacctccagggcagcaacacctatgccctggagaacactatgatcttcaacagccagccggcgaacccgggcaccaccgccacgtacctcgagggcaacatgctcatcaccagcgagagcgagacgcagccggtgaaccgcgtggcgtacaacgtcggcgggcagatggccaccaacaaccagagctccaccactgcccccgcgaccggcacgtacaacctccaggaaatcgtgcccggcagcgtgtggatggagagggacgtgtacctccaaggacccatctgggccaagatcccagagacgggggcgcactttcacccctctccggccatgggcggattcggactcaaacacccaccgcccatgatgctcatcaagaacacgcctgtgcccggaaatatcaccagcctctcggacgtgcccgtcagcagcttcatcacccagtacagcaccgggcaggtcaccgtggagatggagtgggagctcaagaaggaaaactccaagaggtggaacccagagatccagtacacaaacaactacaacgacccccagtttgtggactttgccccggacagcaccggggaatacagaaccaccagacctatcggaacccgataccttacccgacccctttaa

SEQ ID NO: 805 - DNA, 2175 bp, Artificial Sequence
  Description of Artificial Sequence: Synthetic polynucleotide
atgtcttttgttgatcaccctccagattggttggaagaagttggtgaaggtcttcgcgagtttttgggccttgaagcgggcccaccgaaaccaaaacccaatcagcagcatcaagatcaagcccgtggtcttgtgctgcctggttataactatctcggacccggaaacggtctcgatcgaggagagcctgccaacagggcagacgaggtcgcgcgagagcacgacatctcgtacaacgagcagcttgaggcgggagacaacccctacctcaagtacaaccacgcgggcgccgagtttcaggagaagctcgccgacgacacatccttcgggggaaacctcggaaaggcagtctttcaggccaagaaaagggttctcgaaccttttggcctggttgaagagggtgctaagacggcccctaccggaaagcggatagacgaccactttccaaaaagaaagaaggcccggaccgaagaggactccaagccttccacctcgtcagacgccgaagctggacccagcggatcccagcagctgcaaatcccagcccaaccagcctcaagtttgggagctgatacaatgtctgcgggaggtggcggcccattgggcgacaataaccaaggtgccgatggagtgggcaatgcctcgggagattggcattgcgattccacgtggatgggggacagagtcgtcaccaagtccacccgaacctgggtgctgcccggctacaacaaccaccagtaccgagagatcaaaagcggctccgtcgacggaagcaacgccaacgcctactttggatacagcaccccctgggggtactttgactttaaccgcttccacagccactggagcccccgagactggcaaagactcatcaacaactactggggcttcagaccccggtccctcagagtcaaaatcttcaacattcaagtcaaagaggtcacggtgcaggactccaccaccaccatcgccaacaacctcacctccaccgtccaagtgtttacggacgacgactaccagctgccctacgtcgtcggcaacgggaccgagggatgcctgccggccttccctccgcaggtctttacgctgccgcagtacggttacgcgacgctgaaccgcgacaacacagaaaatcccaccgagaggagcagcttcttctgcctagagtactttcccagcaagatgctgagaacgggcaacaactttgagtttacctacaactttgaggaggtgcccttccactccagcttcgctcccagtcagaacctcttcaagctggccaacccgctggtggaccagtacttgtaccgcttcgtgagcacaaataatactggcggagtccagttcaacaagaacctggccgggagatacgccaacacctacaaaaactggttcccggggcccatgggccgaacccagggctggaacctgggctccggggtcaaccgcgccagtgtcagcgccttcgccacgaccaataggatggagctcgagggcgcgagttaccaggtgcccccgcagccgaacggcatgaccaacaacctccagggcagcaacacctatgccctggagaacactatgatcttcaacagccagccggcgaacccgggcaccaccgccacgtacctcgagggcaacatgctcatcaccagcgagagcgagacgcagccggtgaaccgcgtggcgtacaacgtcggcgggcagatggccaccaacaaccagagctccaccactgcccccgcgaccggcacgtacaacctccaggaaatcgtgcccggcagcgtgtggatggagagggacgtgtacctccaaggacccatctgggccaagatcccagagacgggggcgcactttcacccctctccggccatgggcggattcggactcaaacacccaccgcccatgatgctcatcaagaacacgcctgtgcccggaaatatcaccagcttctcggacgtgcccgtcagcagcttcatcacccagtacagcaccgggcaggtcaccgtggagatggagtgggagctcaagaaggaaaactccaagaggtggaacccagagatccagtacacaaacaactacaacgacccccagtttgtggactttgccccggacagcaccggggaatacagaaccaccagacctatcggaacccgataccttacccgacccctttaa

SEQ ID NO: 806 - DNA, 2175 bp, Artificial Sequence
  Description of Artificial Sequence: Synthetic polynucleotide
atgtcttttgttgatcaccctccagattggttggaagaagttggtgaaggtcttcgcgagtttttgggccttgaagcgggcccaccgaaaccaaaacccaatcagcagcatcaagatcaagcccgtggtcttgtgctgcctggttataactatctcggacccggaaacggtctcgatcgaggagagcctgtcaacagggcagacgaggtcgcgcgagagcacgacatctcgtacaacgagcagcttgaggcgggagacaacccctacctcaagtacaaccacgcggacgccgagtttcaggagaagctcgccgacgacacatccttcgggggaaacctcggaaaggcagtctttcaggccaagaaaagggttctcgaaccttttggcctggttgaagagggtgctaagacggcccctaccggaaagcggatagacgaccactttccaaaaagaaagaaggcccggaccgaagaggactccaagcctcccacctcgtcagacgccgaagctggacccagcggatcccagcagctgcaaatcccagcccaaccagcctcaagtttgggagctgatacaatgtctgcgggaggtggcggcccattgggcgacaataaccaaggtgccgatggagtgggcaatgcctcgggagattggcattgcgattccacgtggatgggggacagagtcgtcaccaagtccacccgaacctgggtgctgcccagctacaacaaccaccagtaccgagagatcaaaagcggctccgtcgacggaagcaacgccaacgcctactttggatacagcaccccctgggggtactttgactttaaccgcttccacagccactggagcccccgagactggcaaagactcatcaacaactactggggcttcagaccccggtccctcagagtcaaaatcttcaacattcaagtcaaagaggtcacggtgcaggactccgccaccaccatcgccaacaacctcacctccaccgtccaagtgtttacggacgacgactaccagctgccctacgtcgtcggcaacgggaccgagggatgcctgccggccttccctccgcaggtctttacgctgccgcagtacggttacgcgacgctgaaccgcgacaacacagaaaatcccaccgagaggagcagcttcttctgcctagagtactttcccagcaagatgctgagaacgggcaacaactttgagtttacctacaactttgaggaggtgcccttccactccagcttcgctcccagtcagaacctcttcaagctggccaacccgctggtggaccagtacttgtaccgcttcgtgagcacaaataacactggcggagtccagttcaacaagaacctggccgggagatacgccaacacctacaaaaactggttcccggggcccatgggccgaacccagggctggaacctgggctccggggtcaaccgcgccagtgtcagcgccttcgccacgaccaataggatggagctcgagggcgcgagttaccaggtgcccccgcagccgaacggcatgaccaacaacctccagggcagcaacacctatgccctggagaacactatgatcttcaacagccagccggcgaacccgggcaccaccgccacgtacctcgagggcaacatgctcatcaccagcgagagcgagacgcagccggtgaaccgcgtggcgtacaacgtcggcgggcagatggccaccaacaaccagagctccaccactgcccccgcgaccggcacgtacaacctccaggaaatcgtgcccggcagcgtgtggatggagagggacgtgtacctccaaggacccatctgggccaagatcccagagacgggggcgcactttcacccctctccggccatgggcggattcggactcaaacacccaccgcccatgatgctcatcaagaacacgcctgtgcccggaaatatcaccagcttctcggacgtgcccgtcagcagcttcatcacccagtacagcaccgggcaggtcaccgtggagatggagtgggagctcaagaaggaaaactccaagaggtggaacccagagatccagtacacaaacaactacaacgacccccagtttgtggactttgccccggacagcaccggggaatacagaaccaccagacctatcggaacccgataccttacccgacccctttaa

SEQ ID NO: 807 - DNA, 2175 bp, Artificial Sequence
  Description of Artificial Sequence: Synthetic polynucleotide
atgtcttttgttgatcaccctccagattggttggaagaagttggtgaaggtcttcgcgagtttttgggccttgaagcgggcccaccgaaaccaaaacccaatcagcagcatcaagatcaagcccgtggtcttgtgctgcctggttataactatctcggacccggaaacggtctcgatcgaggagagcctgtcaacagggcagacgaggtcgcgcgagagcacgacatctcgtacaacgagcagcttgaggcgggagacaacccctacctcaagtacaaccacgcggacgccgagtttcaggagaagctcgccgacgacacatccttcgggggaaacctcggaaaggcagtctttcaggccaagaaaagggttctcgaaccttttggcctggttgaagagggtgctaagacggcccctaccggaaagcggatagacgaccactttccaaaaagaaagaaggcccggaccgaagaggactccaagccttccacctcgtcagacgccgaagctggacccagcggatcccagcagccgcaaatcccagcccaaccagcctcaagtttgggagctgatacaatgtctgcgggaggtggcggcccattgggcgacaataaccaaggtgccgatggagtgggcaatgcctcgggagattggcattgcgattccacgtggatgggggacagagtcgtcaccaagtccacccgaacctgggtgctgcccagctacaacaaccaccagtaccgagagatcaaaagcggctccgtcgacggaagcaacgccaacgcctactttggatacagcaccccctgggggtactttgactttaaccgcttccacagccactggagcccccgagactggcaaagactcatcaacaactactggggcttcagaccccggtccctcagagtcaaaatcttcaacattcaagtcaaagaggtcacggtgcaggactccaccaccaccatcgccaacaacctcacctccaccgtccaagtgtttacggacgacgactaccagctgccctacgtcgtcggcaacgggaccgagggatgcctgccggccttccctccgcaggtctttacgctgccgcagtacggttacgcgacgctgaaccgcgacaacacagaaaatcccaccgagaggagcagcttcttctgcctagagtactttcccagcaagatgctgagaacgggcaacaactttgagtttacctacaactttgaggaggtgcccttccactccagcttcgctcccagtcagaacctcttcaagctggccaacccgctggtggaccagtacttgtaccgcttcgtgagcacaaataacactggcggagtccagttcaacaagaacctggccgggagatacgccaacacctacaaaaactggttcccggggcccatgggccgaacccagggctggaacctgggctccggggtcaaccgcgccagtgtcagcgccttcgccacgaccaataggatggagctcgagggcgcgagttaccaggtgcccccgcagccgaacggcatgaccaacaacctccagggcagcaacacctatgccctggagaacactatgatcttcaacagccagccggcgaacccgggcaccaccgccacgtacctcgagggcaacatgctcatcaccagcgagagcgagacgcagccggtgaaccgcgtggcgtacaacgtcggcgggcagatggccaccaacaaccagagctccaccactgcccccgcgaccggcacgtacaacctccaggaaatcgtgcccggcagcgtgtggatggagagggacgtgtacctccaaggacccatctgggccaagatcccagagacgggggcgcactttcacccctctccggccatgggcggattcggactcaaacacccaccgcccatgatgctcatcaagaacacgcctgcgcccggaaatatcaccagcttctcggacgtgcccgtcagcagcttcatcacccagtacagcaccgggcaggtcaccgtggagatggagtgggagctcaagaaggaaaactccaagaggtggaacccagagatccagtacacaaacaactacaacgacccccagtttgtggactttgccccggacagcaccggggaatacagaaccaccagacctatcggaacccgataccttacccgacccctttaa

SEQ ID NO: 808 - DNA, 2175 bp, Artificial Sequence
  Description of Artificial Sequence: Synthetic polynucleotide
atgtcttttgttgatcaccctccagattggttggaagaagttggtgaaggtcttcgcgagtttttgggccttgaagcgggcccaccgaaaccaaaacccaatcagcagcatcaagatcaagcccgtggtcttgtgctgcctggttataactatctcggacccggaaacggtctcgatcgaggagagcctgtcaacagggcagacgaggtcgcgcgagagcacgacatctcgtacaacgagcagcttgaggcgggagacaacccctacctcaagtacaaccacgcggacgccgagtttcaggagaagctcgccgacgacacatccttcgggggaaacctcggaaaggcagtctttcaggccaagaaaagggttctcgaaccttttggcctggttgaagagggtgctaagacggcccctaccggaaagcggatagacgaccactttccaaaaagaaagaaggcccggaccgaagaggactccaagcctcccacctcgtcagacgccgaagctggacccagcggatcccagcagctgcaaatcccagcccaaccagcctcaagtttgggagctgatacaatgtctgcgggaggtggcggcccattgggcgacaataaccaaggtgccgatggagtgggcaatgcctcgggagattggcattgcgattccacgtggatgggggacagagtcgtcaccaagtccacccgaacctgggtgctgcccagctacaacaaccaccagtaccgagagatcaaaagcggctccgtcgacggaagcaacgccaacgcctactttggatacagcaccccctgggggtactttgactttaaccgcttccacagccactggagcccccgagactggcaaagactcatcaacaactactggggcttcagaccccggtccctcagagtcaaaatcttcaacattcaagtcaaagaggtcacggtgcaggactccaccaccaccatcgccaacaacctcacctccaccgtccaagtgtttacggacgacgactaccagctgccctacgtcgtcggcaacgggaccgagggatgcctgccggccttccctccgcaggtctttacgctgccgcagtacggttacgcgacgctgaaccgcgacaacacagaaaatcccaccgagaggagcagcttcttctgcctagagtactttcccagcaagatgctgagaacgggcaacaactttgagtttacctacaactttgaggaggtgcccttccactccagcttcgctcccagtcagaacctcttcaagctggccaacccgctggtggaccagtacttgtaccgcttcgtgagcacaaataacactggcggagtccagttcaacaagaacctggccgggagatacgccaacacctacaaaaactggttcccggggcccatgggccgaacccagggctggaacctgggctccggggtcaaccgcgccagtgtcagcgccttcgccacgaccaataggatggagctcgagggcgcgagttaccaggtgcccccgcagccgaacggcatgaccaacaacctccagggcagcaacacctatgccctggagaacactatgatcttcaacagccagccggcgaacccgggcaccaccgccacgtacctcgagggcaacatgctcatcaccagcgagagcgagacgcagccggtgaaccgcgtggcgtacaacgtcggcgggcagatggccaccaacaaccagagctccaccactgcccccgcgaccggcacgtacaacctccaggaaatcgtgcccggcagcgtgtggatggagagggacgtgtacctccaaggacccatctgggccaagatcccagagacgggggcgcactttcacccctctccggccatgggcggattcggactcaaacacccaccgcccatgatgctcatcaagaacacgcctgtgcccggaaatatcaccagcttctcggacgtgcccgtcagcagcttcatcacccagtacagcaccgggcaggtcaccgtggagatggagtgggagctcaagaaggaaaactccaagaggtggaacccagagatccagtacacaaacaactacaacgacccccagtttgtggactttgccccggacagcaccggggaatacagaaccaccagacctatcggaacccgataccttacccgacccctttaa

SEQ ID NO: 809 - DNA, 2175 bp, Artificial Sequence
  Description of Artificial Sequence: Synthetic polynucleotide
atgtcttttgttgatcaccctccagattggttggaagaagttggtgaaggtcttcgcgagtttttgggccttgaagcgggcccaccgaaaccaaaacccaatcagcagcatcaagatcaagcccgtggtcttgtgctgcctggttataactatctcggacccggaaacggtctcgatcgaggagagcctgtcaacagggcagacgaggtcgcgcgagagcacgacatctcgtacaacgagcagcttgaggcgggagacaacccctacctcaagtacaaccacgcggacgccgagtttcaggagaagctcgccgacgacacatccttcgggggaaacctcggaaaggcagtctttcaggccaagaaaagggttctcgaaccttttggcctggttgaagagggtgctaagacggcccctaccggaaagcggatagacgaccactttccaaaaagaaagaaggcccggaccgaagaggactccaagcctcccacctcgtcagacgccgaagctggacccagcggatcccagcagctgcaaatcccagcccaaccagcctcaagtttgggagctgatacaatgtctgcgggaggtggcggcccattgggcgacaataaccaaggtgccgatggagtgggcaatgcctcgggagattggcattgcgattccacgtggatgggggacagagtcgtcaccaagtccacccgaacctgggtgccgcccagctacaacaaccaccagtaccgagagatcaaaagcggctccgtcgacggaagcaacgccaacgcctactttggatacagcaccccctgggggtactttgactttaaccgcttccacagccactggagcccccgagactggcaaagactcatcaacaactactggggcttcagaccccggtccctcagagtcaaaatcttcaacattcaagtcaaagaggtcacggtgcaggactccaccaccaccatcgccaacaacctcacctccaccgtccaagtgtttacggacgacgactaccagctgccctacgtcgtcggcaacgggaccgagggatgcctgccggccttccctccgcaggtctttacgctgccgcagtacggttacgcgacgctgaaccgcgacaacacagaaaatcccaccgagaggagcagcttcttctgcctagagtactttcccagcaagatgctgagaacgggcaacaactttgagtttacctacaactttgaggaggtgcccttccactccagcttcgctcccagtcagaacctcttcaagctggccaacccgctggtggaccagtacttgtaccgcttcgtgagcacaaataacactggcggagtccagttcaacaagaacctggccgggagatacgccaacacctacaaaaactggttcccggggcccatgggccgaacccagggctggaacctgggctccggggtcaaccgcgccagtgtcagcgccttcgccacgaccaataggatggagctcgagggcgcgagttaccaggtgcccccgcagccgaacggcatgaccaacaacctccagggcagcaacacctatgccctggagaacactatgatcttcaacagccagccggcgaacccgggcaccaccgccacgtacctcgagggcaacatgctcatcaccagcgagagcgagacgcagccggtgaaccgcgtggcgtacaacgtcggcgggcagatggccaccaacaaccagagctccaccactgcccccgcgaccggcacgtacaacctccaggaaatcgtgcccggcagcgtgtggatggagagggacgtgtacctccaaggacccatctgggccaagatcccagagacgggggcgcactttcacccctctccggccatgggcggattcggactcaaacacccaccgcccatgatgctcatcaagaacacgcctgtgcccggaaatatcaccagcttctcggacgtgcccgtcagcagcttcatcacccagtacagcaccgggcaggtcgccgtggagatggagtgggagctcaagaaggaaaactccaagaggtggaacccagagatccagtacacaaacaactacaacgacccccagtttgtggactttgccccggacagcaccggggaatacagaaccaccagacctatcggaacccgataccttacccgacccctttaa

SEQ ID NO: 810 - DNA, 2175 bp, Artificial Sequence
  Description of Artificial Sequence: Synthetic polynucleotide
atgtcttttgttgatcaccctccagattggttggaagaagttggtgaaggtcttcgcgagtttttgggccttgaagcgggcccaccgaaaccaaaacccaatcagcagcatcaagatcaagcccgtggtcttgtgctgcctggttataactatctcggacccggaaacggtctcgatcgaggagagcctgtcaacagggcagacgaggtcgcgcgagagcacgacatctcgtacaacgagcagcttgaggcgggagacaacccctacctcaagtacaaccacgcggacgccgagtttcaggagaagctcgccgacgacacatccttcgggggaaacctcggaaaggcagtctttcaggccaagaaaagggttctcgaaccttttggcctggttgaagagggtgctaagacggcccctaccggaaagcggatagacgaccactttccaaaaagaaagaaggcccggaccgaagaggactccaagccttccacctcgtcagacgccgaagctggacccagcggatcccagcagctgcaaatcccagcccaaccagcctcaagtttgggagctgatacaatgtctgcgggaggtggcggcccattgggcgacaataaccaaggtgccgatggagtgggcaatgcctcgggagattggcattgcgattccacgtggatgggggacagagtcgtcaccaagtccacccgaacctgggtgctgcccagctacaacaaccaccagtaccgagagatcaaaagcggctccgtcgacggaagcaacgccaacgcctactttggatacagcaccccctgggggtactttgactttaaccgcttccacagccactggagcccccgagactggcaaagactcatcaacaactactggggcttcagaccccggtccctcagagtcaaaatcttcaacattcaagtcaaagaggtcacggtgcaggactccaccaccaccatcgccaacaacctcacctccaccgtccaagtgtttacggacgacgactaccagctgccctacgtcgtcggcaacgggaccgagggatgcctgccggccttccctccgcaggtctttacgctgccgcagtacggttacgcgacgctgaaccgcgacaacacagaaaatcccaccgagaggagcagcttcttctgcctagagtactttcccagcaagatgctgagaacgggcaacaactttgagtttacctacaactttgaggaggtgcccttccactccagcttcgctcccagtcagaacctcttcaagctggccaacccgctggtggaccagtacttgtaccgcttcgtgagcacaaataacactggcggagtccagttcaacaagaacctggccgggagatacgccaacacctacaaaaactggttcccggggcccatgggccgaacccagggctggaacctgggctccggggtcaaccgcgccagtgtcagcgccttcgccacgaccaataggatggagctcgagggcgcgagttaccaggtgcccccgcagccgaacggcatgaccaacaacctccagggcagcaacacctatgccctggagaacactatgatcttcaacagccagccggcgaacccgggcaccaccgccacgtacctcgagggcaacatgctcatcaccagcgagagcgagacgcagccggtgaaccgcgtggcgtacaacgtcggcgggcagatggccaccaacaaccagagctccaccactgcccccgcgaccggcacgtacaacctccaggaaatcgtgcccggcagcgtgtggatggagagggacgtgtacctccaaggacccatctgggccaagatcccagagacgggggcgcactttcacccctctccggccatgggcggattcggactcaaacacccaccgcccatgatgctcatcaagaacacgcctgcgcccggaaatatcaccagcttctcggacgtgcccgtcagcagcttcatcacccagtacagcaccgggcaggtcaccgtggagatggagtgggagctcaagaaggaaaactccaagaggtggaacccagagatccagtacacaaacaactacaacgacccccagtttgtggactttgccccggacagcaccggggaatacagaaccaccagacctatcggaacccgataccttacccgacccctttaa

SEQ ID NO: 811 - DNA, 2175 bp, Artificial Sequence
  Description of Artificial Sequence: Synthetic polynucleotide
atgtcttttgttgatcaccctccagattggttggaagaagttggtgaaggtcttcgcgagtttttgggccttgaagcgggcccaccgaaaccaaaacccaatcagcagcatcaagatcaagcccgtggtcttgtgctgcctggttataactatctcggacccggaaacggtctcgatcgaggagagcctgtcaacagggcagacgaggtcgcgcgagagcacgacatctcgtacaacgagcagcttgaggcgggagacaacccctacctcaagtacaaccacgcggacgccgagtttcaggagaagctcgccgacgacacatccttcgggggaaacctcggaaaggcagtctttcaggccaagaaaagggttctcgaaccttttggcctggctgaagagggtgctaagacggcccctaccggaaagcggatagacgaccactttccaaaaagaaagaaggcccggaccgaagaggactccaagccttccacctcgtcagacgccgaagctggacccagcggatcccagcagctgcaaatcccagcccaaccagcctcaagtttgggagctgatacaatgtctgcgggaggtggcggcccattgggcgacaataaccaaggtgccgatggagtgggcaatgcctcgggagattggcattgcgattccacgtggatgggggacagagtcgtcaccaagtccacccgaacctgggtgctgcccagctacaacaaccaccagtaccgagagatcaaaagcggctccgtcgacggaagcaacgccaacgcctactttggatacagcaccccctgggggtactttgactttaaccgcttccacagccactggagcccccgagactggcaaagactcatcaacaactactggggcttcagaccccggtccctcagagccaaaatcttcaacattcaagtcaaagaggtcacggtgcaggactccaccaccaccatcgccaacaacctcacctccaccgtccaagtgtttacggacgacgactaccagctgccctacgtcgtcggcaacgggaccgagggatgcctgccggccttccctccgcaggtctttacgctgccgcagtacggttacgcgacgctgaaccgcgacaacacagaaaatcccaccgagaggagcagcttcttctgcctagagtactttcccagcaagatgctgagaacgggcaacaaccttgagtttacctacaactttgaggaggtgcccttccactccagcttcgctcccagtcagaacctcttcaagctggccaacccgctggtggaccagtacttgtaccgcttcgtgagcacaaataacactggcggagtccagttcaacaagaacctggccgggagatacgccaacacctacaaaaactggttcccggggcccatgggccgaacccagggctggaacctgggctccggggtcaaccgcgccagtgtcagcgccttcgccacgaccaataggatggagctcgagggcgcgagttaccaggtgcccccgcagccgaacggcatgaccaacaacctccagggcagcaacacctatgccctggagaacactatgatcttcaacagccagccggcgaacccgggcaccaccgccacgtacctcgagggcaacatgctcatcaccagcgagagcgagacgcagccggtgaaccgcgtggtgcacaacgtcggcgggcagatggccaccaacaaccagagctccaccactgcccccgcgaccggcacgtacaacctccaggaaatcgtgcccggcagcgtgtggatggagagggacgtgtacctccaaggacccatctgggccaagatcccagagacgggggcgcactttcacccctctccggccatgggcggattcggactcaaacacccaccgcccatgatgctcatcaagaacacgcctgtgcccggaaatatcaccagcttctcggacgtgcccgtcagcagcttcatcacccagtacagcaccgggcaggtcaccgtggagatggagtgggagctcaagaaggaaaactccaagaggtggaacccggagatccagtacacaaacaactacaacgacccccagtttgtggactttgccccggacagcaccggggaatacagaaccaccagacctatcggaacccgataccttacccgacccctttaa

SEQ ID NO: 812 - DNA, 2175 bp, Artificial Sequence
  Description of Artificial Sequence: Synthetic polynucleotide
atgtcttttgttgatcaccctccagattggttggaagaagttggtgaaggtcttcgcgagtttttgggccttgaagcgggcccaccgaaaccaaaacccaatcagcagcatcaagatcaagcccgtggtcttgtgctgcctggttataactatctcggacccggaaacggtctcgatcgaggagagcctgtcaacagggcagacgaggtcgcgcgagagcacgacatctcgtacaacgagcagcttgaggcgggagacaacccctacctcaagtacaaccacgcggacgccgagtttcaggagaagctcgccgacgacacatccttcgggggaaacctcggaaaggcagtctttcaggccaagaaaagggttctcgaaccttttggcctggttgaagagggtgctaagacggcccctaccggaaagcggatagacgaccactttccaaaaagaaagaaggcccggaccgaagaggactccaagccttccacctcgtcagacgccgaagctggacccagcggatcccagcagctgcaaatcccagcccaaccagcctcaagtttgggagctgatacaatgtctgcgggaggtggcggcccattgggcgacaataaccaaggtgccgatggagtgggcaatgcctcgggagattggcattgcgattccacgtggatgggggacagagtcgtcaccaagtccacccgaacctgggtgctgcccagctacaacaaccaccagtaccgagagatcaaaagcggctccgtcgacggaggcaacgccaacgcctactttggatacagcaccccctgggggtactttgactttaaccgcttccacagccactggagcccccgggactggcaaagactcatcaacaactactggggcttcagaccccggtccctcagagtcaaaatcttcaacattcaagtcaaagaggtcacggtgcaggactccaccaccaccatcgccaacaacctcacctccaccgtccaagtgtttacggacgacgactaccagctgccctacgtcgtcggcaacgggaccgagggatgcctgccggccttccctccgcaggtctttacgctgccgcagtacggttacgcgacgctgaaccgcgacaacacagaaaatcccaccgagaggagcagcttcttctgcctagagtactttcccagcaagatgctgagaacgggcaacaactttgagtttacctacaactttgaggaggtgcccttccactccagcttcgctcccagtcagaacctcttcaagctggccaacccgctggtggaccagtacttgtaccgcttcgtgagcacaaataacactggcggagtccagttcaacaagaacctggccgggagatacgccaacacctacaaaaactggttcccggggcccatgggccgaacccagggctggaacctgggctccggggtcaaccgcgccagtgtcagcgccttcgccacgaccaataggatggagctcgagggcgcgagttaccaggtgcccccgcagccgaacggcatgaccaacaacctccagggcagcaacacctatgccctggagaacactatgatcttcaacagccagccggcgaacccgggcaccaccgccacgtacctcgagggcaacatgctcatcaccagcgagagcgagacgcagccggtgaaccgcgtggcgtacaacgtcggcgggcagatggccaccaacaaccagagctccaccactgcccccgcgaccggcacgtacaacctccaggaaatcgtgcccggcagcgtgtggatggagagggacgtgtacctccaaggacccatctgggccaagatcccagagacgggggcgcactttcacccctctccggccatgggcggattcggactcaaacacccaccgcccatgatgctcatcaagaacacgcctgcgcccggaaatatcaccagcttctcggacgtgcccgtcagcagcttcatcacccagtacagcaccgggcaggtcaccgtggagatggagtgggagctcaagaagggaaactccaagaggtggaacccagagatccagtacacaaacaactacaacgacccccagtttgtggactttgccccggacagcaccggggaatacagaaccaccagacctatcggaacccgataccttacccgacccctttaa

SEQ ID NO: 813 - DNA, 2175 bp, Artificial Sequence
  Description of Artificial Sequence: Synthetic polynucleotide
atgtcttttgttgatcaccctccagattggttggaagaagttggtgaaggtcttcgcgagtttttgggccttgaagcgggcccaccgaaaccaaaacccaatcagcagcatcaagatcaagcccgtggtcttgtgctgcctggttataactatctcggacccggaaacggtctcgatcgaggagagcctgtcaacagggcagacgaggtcgcgcgagagcacgacatctcgtacaacgagcagcttgaggcgggagacaacccctacctcaagtacaaccacgcggacgccgagtttcaggagaagctcgccgacgacacgtccttcgggggaaacctcggaaaggcagtctttcaggccaagaaaagggttctcgaaccttttggcctggttgaagagggtgctaagacggcccctaccggaaagcggatagacgaccactttccaaaaagaaagaaggcccggaccgaagaggactccaagccttccacctcgtcagacgccgaagctggacccagcggatcccagcagctgcaaatcccagcccaaccagcctcaagtttgggagctgatacaatgtctgcgggaggtggcggcccattgggcgacaataaccaaggtgccgatggagtgggcaatgcctcgggagattggcattgcgattccacgtggatgggggacagagtcgtcaccaagtccacccgaacctgggtgctgcccagctacaacaaccaccagtaccgagagatcaaaagcggctccgtcgacggaagcaacgccaacgcctactttggatacagcaccccctgggggtactttgactttaaccgcttccacagccactggagcccccgagactggcaaagactcatcaacaactactggggcttcagaccccggtccctcagagtcaaaatcttcaacattcaagtcaaagaggtcacggtgcaggactccaccaccaccatcgccaacaacctcacctccaccgtccaagtgtttacggacgacgactaccagctgccctacgtcgtcggcaacgggaccgagggatgcctgccggccttccctccgcaggtctttacgctgccgcagtacggttacgcgacgctgaaccgcgacaacacagaaaatcccaccgagaggagcagcttcttctgcctagagtactttcccagcaagatgctgagaacgggcaacaactttgagtttacctacaactttgaggaggtgcccttccactccagcttcgctcccagtcagaacctcttcaagctggccaacccgctggtggaccagtacttgtaccgcttcgtgagcacaaataacactggcggagtccagttcaacaagaacctggccgggagatacgccaacacctacaaaaactggttcccggggcccatgggccgaacccagggctggaacctgggctccggggtcaaccgcgccagtgtcagcgccttcgccacgaccaataggatggagctcgagggcgcgagttaccaggtgcccccgcagccgaacggcatgaccaacaacctccagggcagcaacacctatgccctggagaacactatgatcttcaacagccagccggcgaacccgggcaccaccgccacgtacctcgagggcaacatgctcatcaccagcgagagcgagacgcagccggtgaaccgcgtggcgtacaacgtcggcgggcagatggccaccaacaaccagagctccaccactgcccccgcgaccggcacgtacaacctccaggaaatcgtgcccggcagcgtgtggatggagagggacgtgtacctccaaggacccatctgggccaagatcccagagacgggggtgcactttcacccctctccggccatgggcggattcggactcaaacacccaccgcccatgatgctcatcaagaacacgcctgtgcccggaaatatcaccagcttctcggacgtgcccgtcagcagcttcatcacccagtacagcaccgggcaggtcaccgtggagatggagtgggagctcaagaaggaaaactccaagaggtggaacccagagatccagtacacaaacaactacaacgacccccagtttgtggactttgccccggacagcaccggggaatacagaaccaccagacctatcggaacccgataccttacccgacccctttaa

SEQ ID NO: 814 - DNA, 2175 bp, Artificial Sequence
  Description of Artificial Sequence: Synthetic polynucleotide
  misc_feature (1652)..(1652): n is a, c, t, or g
atgtcttttgttgatcaccctccagattggttggaagaagttggtgaaggtcttcgcgagtttttgggccttgaagcgggcccaccgaaaccaaaacccaatcagcagcatcaagatcaagcccgtggtcttgtgctgcctggttataactatctcggacccggaaacggtctcgatcgaggagagcctgtcaacagggcagacgaggtcgcgcgagagcacgacatctcgtacaacgagcagcttgaggcgggagacaacccctacctcaagtacaaccacgcggacgccgagtttcaggagaagctcgccgacgacacatccttcgggggaaacctcggaaaggcagtctttcaggccaagaaaagggttctcgaaccttttggcctggttgaagagggtgctaagacggcccctaccggaaagcggatagacgaccactttccaaaaagaaagaaggcccggaccgaggaggactccaagccttccacctcgtcagacgccgaagctggacccagcggatcccagcagctgcaaatcccagcccaaccagcctcaagtttgggagctgatacaatgtctgcgggaggtggcggcccattgggcgacaataaccaaggtgccgatggagtgggcaatgcctcgggagattggcattgcgattccacgtggatgggggacagagtcgtcaccaagtccacccgaacctgggtgctgcccagctacaacaaccaccagtaccgagagatcaaaagcggctccgtcgacggaagcaacgccaacgcctactttggatacagcaccccctgggggtactttgactttaaccgcttccacagccactggagcccccgagactggcaaagactcatcaacaactactggggcttcagaccccggtccctcagagtcaaaatcttcaacattcaagtcaaagaggtcacggtgcaggactccaccaccaccatcgccaacaacctcacctccaccgtccaagtgtttacggacgacgactaccagctgccctacgtcgtcggcaacgggaccgagggatgcctgccggccttccctccgcaggtctttacgctgccgcagtacggttacgcgacgctgaaccgcgacaacacagaaaatcccaccgagaggagcagcttcttctgcctagagtactttcccagcaagatgctgagaacgggcaacaactttgagtttacctacaactttgaggaggtgcccttccactccagcttcgctcccagtcagaacctcttcaagctggccaacccgctggtggaccagtacttgtaccgcttcgtgagcacaaataacactggcggagtccagttcaacaagaacctggccgggagatacgccaacacctacaaaaactggttcccggggcccatgggccgaacccagggctggaacctgggctccggggtcaaccgcgccagtgtcagcgccttcgccacgaccaataggatggagctcgagggcgcgagttaccaggtgcccccgcagccgaacggcatgaccaacaacctccagggcagcaacacctatgccctggagaacactatgatcttcaacagccagccggcgaacccgggcaccaccgccacgtacctcgagggcagcatgctcatcaccancgagagcgagacgcagccggtgaaccgcgtggcgtacaacgtcggcgggcagatggccaccaacaaccagagctccaccactgcccccgcgaccggcacgtacaacctccaggaaatcgtgcccggcagcgtgtggatggagagggacgtgtacctccaaggacccatctgggccaagatcccagagacgggggcgcactttcacccctctccggccatgggcggattcggactcaaacacccaccgcccatgatgctcatcaagaacacgcctgtgcccggaaatatcaccagcttctcggacgtgcccgtcagcagcttcatcacccagtacagcaccgggcaggtcaccgtggagatggagtgggagctcaagaaggaaaactccaagaggtggaacccagagatccagtacacaaacaactacaacgacccccagtttgtggactttgccccggacagcaccggggaatacagaaccaccagacctatcggaacccgataccttacccgacccctttaa

SEQ ID NO: 815 - DNA, 2211 bp, Artificial Sequence
  Description of Artificial Sequence: Synthetic polynucleotide
atggctgctgacggttatcttccagattggctcgaggacaacctttctgaaggcattcgtgagtggtgggctctgaaacctggagtccctcaacccaaagcgaaccaacaacaccaggacaaccgtcggggtcttgtgcttccgggttacaaatacctcggacccggtaacggactcgacaaaggagagccggtcaacgaggcggacgcggcagccctcgaacacgacaaagcttacgaccagcagctcaaggccggtgacaacccgtacctcaagtacaaccacgccgacgccgagtttcaggagcgtcttcaagaagatacgtcttttgggggcaaccttggcagagcagtcttccaggccaaaaagaggatccttgagcctcttggtctggttgaggaagcagctaaaacggctcctggaaagaagaggcctgtagatcagtctcctcaggaaccggactcatcatctggtgttggcaaatcgggcaaacagcctgccagaaaaagactaaatttcggtcagactggcgactcagagtcagtcccagaccctcaacctctcggagaaccaccagcagcccccacaagtttgggatctaatacaatggcttcaggcggtggcgcaccaatggcagacaataacgagggtgccgatggagtgggtaattcctcaggaaattggcattgcgattcccaatggctgggcgacagagtcatcaccaccagcaccagaacctgggccctgcccacttacaacaaccatctctacaagcaaatctccagccaatcaggagcttcaaacgacaaccactactttggctacagcaccccttgggggtattttgactttaacagattccactgccacttctcaccacgtgactggcagcgactcattaacaacaactggggattccggcccaagaaactcagcttcaagctcttcaacatccaagttaaagaggtcacgcagaacgatggcacgacgactattgccaataaccttaccagcacggttcaagtgtttacggactcggagtatcagctcccgtacgtgctcgggtcggcgcaccaaggctgtctcccgccgtttccagcggacgtcttcatggtccctcagtatggatacctcaccctgaacaacggaagtcaagcggtgggacgctcatccttttactgcctggagtacttcccttcgcagatgctaaggactggaaataacttccaattcagctataccttcgaggatgtaccttttcacagcagctacgctcacagccagagtttggatcgcttgatgaatcctcttattgatcagtatctgtactacctgaacagaacgcaaggaacaacctctggaacaaccaaccaatcacggctgctttttagccaggctgggcctcagtctatgtctttgcaggccagaaattggctacctgggccctgctaccggcaacagagactttcaaagactgctaacgacaacaacaacagtaactttccttggacagcggccagcaaatatcatctcaatggccgcgactcgctggtgaatccaggaccagctatggccagtcacaaggacgatgaagaaaaatttttccctatgcacggcaatctaatatttggcaaagaagggacaacggcaagtaacgcagaattagataatgtaatgattacggatgaagaagagattcgtaccaccaatcctgtggcaacagagcagtatggaactgtggcaaataacttgcagagctcaaatacagctcccacgactagaactgtcaatgatcagggggccttacctggcatggtgtggcaagatcgtgacgtgtaccttcaaggacctatctgggcaaagattcctcacacggatggacactttcatccttctcctctgatgggaggctttggactgaaacatccgcctcctcaaatcatgatcaaaaatactccggtaccggcaaatcctccgacgactttcagcccggccaagtttgcttcatttatcactcagtactccactggacaggtcagcgtggaaattgagtgggagctacagaaagaaaacagcaaacgttggaatccagagattcagtacacttccaactacaacaagtctgttaatgtggactttactgtagacactaatggtgtttatagtgaacctcgccctattggaacccggtatctcacacgaaacttgtaa

SEQ ID NO: 816 - DNA, 2205 bp, Artificial Sequence; identical to SEQ ID NO: 84
  Description of Artificial Sequence: Synthetic polynucleotide

SEQ ID NO: 817 - DNA, 2234 bp, Artificial Sequence
  Description of Artificial Sequence: Synthetic polynucleotide
atgtcttttgttgatcaccctccagattggttggaagaagttggtgaaggtcttcgcgagtttttgggccttgaagcgggcccaccgaaaccaaaacccaatcagcagcatcaagatcaagcccgtggtcttgtgctgcctggttataactatctcggacccggaaacggtctcgatcgaggagagcctgtcaacagggcagacgaggtcgcgcgagagcacgacatctcgtacaacgagcagcttgaggcgggagacaacccctacctcaagtacaaccacgcggacgccgagtttcaggagaagctcgccgacgacacatccttcgggggaaacctcggaaaggcagtctttcaggccaagaaaagggttctcgaaccttttggcctggttgaagagggtgctaagacggcccctaccggaaagcggatagacgaccactttccaaaaagaaagaaggctcggaccgaagaggactccaagccttccacctcgtcagacgccgaagctggacccagcggatcccagcagctgcaaatcccagcccaaccagcctcaagtttgggagctgatacaatgtctgcgggaggtggcggcccattgggcgacaataaccaaggtgccgatggagtgggcaatgcctcgggagattggcattgcgattccacgtggatgggggacagagtcgtcaccaagtccacccgaacctgggtgctgcccagctacaacaaccaccagtaccgagagatcaaaagcggctccgtcgacggaagcaacgccaacgcctactttggatacagcaccccctgggggtactttgactttaaccgcttccacagccactggagcccccgagactggcaaagactcatcaacaactactggggcttcagaccccggtccctcagagtcaaaatcttcaacattcaagtcaaagaggtcacggtgcaggactccaccaccaccatcgccaacaacctcacctccaccgtccaagtgtttacggacgacgactaccagctgccctacgtcgtcggcaacgggaccgagggatgcctgccggccttccctccgcaggtctttacgctgccgcagtacggttacgcgacgctgaaccgcgacaacacagaaaatcccaccgagaggagcagcttcttctgcctagagtactttcccagcaagatgctgagaacgggcaacaactttgagtttacctacaactttgaggaggtgcccttccactccagcttcgctcccagtcagaacctgttcaagctggccaacccgctggtggaccagtacttgtaccgcttcgtgagcacaaataacactggcggagtccagttcaacaagaacctggccgggagatacgccaacacctacaaaaactggttcccggggcccatgggccgaacccagggctggaacctgggctccggggtcaaccgcgccagtgtcagcgccttcgccacgaccaataggatggagctcgagggcgcgagttaccaggtgcccccgcagccgaacggcatgaccaacaacctccagggcagcaacacctatgccctggagaacactatgatcttcaacagccagccggcgaacccgggcaccaccgccacgtacctcgagggcaacatgctcatcaccagcgagagcgagacgcagccggtgaaccgcgtggcgtacaacgtcggcgggcagatggccaccaacaaccagagctccaccactgcccccgcgaccggcacgtacaacctccaggaaatcgtgcccggcagcgtgtggatggagagggacgtgtacctccaaggacccatctgggccaagatcccagagacgggggcgcactttcacccctctccggccatgggcggattcggactcaaacacccaccgcccatgatgctcatcaagaacacgcctgtgcccggaaatatcaccagcttctcggacgtgcccgtcagcagcttcatcacccagtacagcaccgggcaggtcaccgtggagatggagtgggagctcaagaaggaaaactccaagaggtggaacccagagatccagtacacaaacaactacaacgacccccagtttgtggactttgccccggacagcaccggggaatacagaaccaccagacctatcggaacccgataccttacccgacccctttaacccattcatgtcgcataccctcaataaaccgtgtattcgtgtcagtaaaatactgcctc

SEQ ID NO: 818 - protein, 736 aa, Artificial Sequence
  Description of Artificial Sequence: Synthetic polypeptide
MAADGYLPDWLEDNLSEGIREWWALKPGVPQPKANQQHQDNRRGLVLPGYKYLGPGNGLDKGEPVNEADAAALEHDKAYDQQLKAGDNPYLKYNHADAEFQERLQEDTSFGGNLGRAVFQAKKRILEPLGLVEEAAKTAPGKKRPVDQSPQEPDSSSGVGKSGKQPARKRLNFGQTGDSESVPDPQPLGEPPAAPTSLGSNTMASGGGAPMADNNEGADGVGNSSGNWHCDSQWLGDRVITTSTRTWALPTYNNHLYKQISSQSGASNDNHYFGYSTPWGYFDFNRFHCHFSPRDWQRLINNNWGFRPKKLSFKLFNIQVKEVTQNDGTTTIANNLTSTVQVFTDSEYQLPYVLGSAHQGCLPPFPADVFMVPQYGYLTLNNGSQAVGRSSFYCPEYFPSQMLRTGNNFQFSYTFEDVPFHSSYAHSQSLDRLMNPLIDQYLYYLNRTQGTTSGTTNQSRLLFSQAGPQSMSLQARNWLPGPCYRQQRLSKTANDNNNSNFPWTAASKYHLNGRDSLVNPGPAMASHKDDEEKFFPMHGNLIFGKEGTTASNAELDNVMITDEEEIRTTNPVATEQYGTVANNLQSSNTAPTTRTVNDQGALPGMVWQDRDVYLQGPIWAKIPHTDGHFHPSPLMGGFGLKHPPPQIMIKNTPVPANPPTTFSPAKFASFITQYSTGQVSVEIEWELQKENSKRWNPEIQYTSNYNKSVNVDFTVDTNGVYSEPHPIGTRYLTRNL

SEQ ID NO: 819 - protein, 736 aa, Artificial Sequence
  Description of Artificial Sequence: Synthetic polypeptide
MAADGYLPDWLEDNLSEGIREWWALKPGVPQPKANQQHQDNRRGLVLPGYKYLGPGNGLDKGEPVNEADAAALEHDKAYDQQLKAGDNPYLKYNHADAEFQERLQEDTSFGGNLGRAVFQAKKRILEPLGLVEEAAKTAPGKKRPVDQSPQEPDSSSGVGKSGKQPARKRLNFGQTGDSESVPDPQPLGEPPAAPTSLGSNTMASGGGAPMADNNEGADGVGNSSGNWHCDSQWLGDRVITTSTRTWALPTYNNHLYKQISSQSGASNDNHYFGYSTPWGYFDFNRFHCHFSPRDWQRLINNNWGFRPKKLSFKLFNIQVKEVTQNDGTTTVANNLTSTVQVFTDSEYQLPYVLGSAHQGCLPPFPADVFMVPQYGYLTLNNGSQAVGRSSFYCLEYFPSQMLRTGNNFQFSYTFEDVPFHSSYAHSQSLDRLMNPLIDQYLYYLNRTQGTTSGTTNQSRLLFSQAGPQSMSLQARNWLPGPCYRQQRLSKTANDNNNSNFPWTAASKYHLNGRDSLVNPGPAMASHKDDEEKFFPMHGNLIFGKEGTTASNAELDNVMITDEEEIRTTNPVATEQYGTVANNLQSSNTAPTTRTVNDQGALPGMVWQDRDVYLQGPIWAKIPHTDGHFHPSPLMGGFGLKHPPPQIMIKNTPVPANPPTTFSPAKFASFITQYSTGQVSVEIEWELQKENSKRWNPEIQYTSNYNKSVNVDFTVDTNGVYSEPRPIGTRYLTRNL

SEQ ID NO: 820 - protein, 736 aa, Artificial Sequence
  Description of Artificial Sequence: Synthetic polypeptide
MAADGYLPDWLEDNLSEGIREWWALKPGVPQPKANQQHQDNRRGLVLPGYKYLGPGNGLDKGEPVNEADAAALEHDKAYDQQLKAGDNPYLKYNHADAEFQERLQEDTSFGGNLGRAVFQAKKRILEPLGLVEEAAKTAPGKKRPVDQSPQEPDSSSGVGKSGKQPARKRLNFGQTGDSESVPDPQPLGEPPAAPTSLGSNTMASGGGAPMADNNEGADGVGNSSGNWHCDSQWLGDRVITTSTRTWALPTYNNHLYKQISGQSGASNDNHYFGYSTPWGYFDFNRFHCHFSPRDWQRLINNNWGFRPKKLSFKLFNIQVKEVTQNDGTTTIANNLTSTVQVFTDSEYQLPYVLGSAHQGCLPPFPADVFMVPQYGYLTLNNGSQAVGRSSFYCLEYFPSQMLRTGNNFQFSYTFEDVPFHSSYAHSQSLDRLMNPLIDQYLYYLNRTQGTTSGTTNQSRLLFSQAGPQSMSLQARNWLPGPCYRQQRLSKTANGNNNSNFPWTAASKYHLNGRDSLVNPGPAMASHKDDEEKFFPMHGNLIFGKEGTTASNAELDNVMITDEEEIRTTNPVATEQCGTVANNLQSSNTAPTTRTVNDQGALPGMVWQDRDVYLQGPIWAKIPHTDGHFHPSPLMGGFGLKHPPPQIMIKNTPVPANPPTTFSPAKFASFITQYSTGQVSVEIEWELQKENSKRWNPEIQYTSNYNKSVNVDFTVDTNGVYSEPRPIGTRYLTRNL

SEQ ID NO: 821 - protein, 736 aa, Artificial Sequence
  Description of Artificial Sequence: Synthetic polypeptide
MAADGYLPDWLEDNLSEGIREWWALKPGVPQPKANQQHQDNRRGLVLPGYKYLGPGNGLDKGEPVNEADAAALEHDKAYDQQLKAGDNPYLKYNHADAEFQERLQEDTSFGGNLGRAVFQAKKRILEPLGLVEGAAKTAPGKKRPVDQSPQEPDSSSGVGKSGKQPARKRLNFGQTGDSESVPDPQPLGEPPAAPTSLGSNTMASGGGAPMADNNEGADGVGNSSGNWHCDSQWLGDRVITTSTRTWALPTYNSHLYKQISSQSGASNDNHYFGYSTPWGYFDFNRFHCHFSPRDWQRLINNNWGFRPKKLSFKLFNIQVKEVTQNDGTTTIANNLTSTVQVFTDSEYQLPYVLGSAHQGCLPPFPADAFMVPQYGYLTLNNGSQAVGRSSFYCLEYFPSQMLRTGNNFQFSYTFEDVPFHGSYAHSQSLDRLMNPLIDQYLYYLNRTQGTTSGTTNQSRLLFSQAGPQSMSLQARNWLPGPCYRQQRLSKTANDNNNSNFPWTAASKYHLNGRDSLVNPGPAMASHKDDEEKFFPMHGNLIFGKEGTTASNAELDNVMITDEEEIRTTNPVATEQYGTVANNLQSSNTAPTTRTVNDQGALPGMVWQDRDVYLQGPIWAKIPHTDGHFHPSPLMGGFGLKHPPPQIMIKNTPVPANPPTTFSPAKFASFITQYSTGQVSVEIEWELQKENSKRWNPEIQYTSNYNKSVNVDFTVDTNGVYSEPRPIGTRYLTRNS

SEQ ID NO: 822 - protein, 736 aa, Artificial Sequence
  Description of Artificial Sequence: Synthetic polypeptide
MAADGYLPDWLEDNLSEGIREWWALKPGVPQPKANQQHQDNRRGLVLPGYKYLGPGNGLDKGEPVNEADAAALEHDKAYDQQLKAGDNPYLKYNHADAEFQERLQEDTSFGGNLGRAVFQAKKRILEPLGLVEGAAKTAPGKKRPVDQSPQEPDSSSGVGKSGKQLARKRLNFGQTGDSESVPDPQPLGEPPAAPTSLGSNTMASGGGAPMADNNEGADGVGNSSGNWHCDSQWLGDRVITTSTRTWALPTYNSHLYKQISGQSGASNDNHYFGYSTPWGYFDFNRFHCHFSPRDWQRLINNNWGFRPKKLSFKLFNIQVKEVTQNDGTTTIANNLTSTVQVFTDSEYQLPYVLGSAHQGCLPPFPADVFMVPQYGYLTLNNGSQAVGRSSFYCLEYFPSQMLRTGNNFQFSYTFEDVPFHSSYAHSQSLDRLMNPLIDQYLYYLNRTQGTTSGTTNQSRLLFSQAGPQSMSLQARNWLPGPCYRQQRLSKTANDNNNSNFPWTAASKYHLNGRDSLVNPGPAMASHKDDEEKFFPMHGNLIFGKEGTTASNAELDNVMITDEEEIRTTNPVATEQYGTVANNLQSSNTAPTTRTVNDQGALPGMVWQDRDVYLQGPIWAKIPHTDGHFHPSPLMGGFGLKHPPPQIMIKNTPVPANPPTTFSPAKFASFITQYSTGQVSVEIEWELQKENSKRWNPEIQYTSNYNKSVNVDFTVDTNGVYSEPRPIGTRYLTRNL

SEQ ID NO: 823 - protein, 736 aa, Artificial Sequence
  Description of Artificial Sequence: Synthetic polypeptide
MAADGYLPDWLEDNLSEGIREWWALKPGVPQPKANQQHQDDRRGLVLPGYKYLGPGNGLDKGEPVNEADAAALEHDKAYDQQLKAGDNPCLKYNHADAEFQERLQEDTSFGGNLGRAVFQAKKRILEPLGLVEEAAKTAPGKKRPVDQSPQEPDSSSGVGKSGKQPARKRLNFGQTGDSESVPDPQPLGEPPAAPTSLGSNTMASGGSAPMADNNEGADGVGNSSGNWHCDSQWLGDRVITTSTRTWALPTYNNHLYKQISSQSGASNDNHYFGYSTPWGYFDFNRFHCHFSPRDWQRLINNNWGFRPKKLSFKLFNIQVKEVTQNDGTTTIANNLTSTVQVFTDSEYQLPYVLGSAHQGCLPPFPADVFMVPQYGYLTLNNGSQAVGRSSFYCLEYFPSQMLRTGNNFQFSYTFEDVPFHSSYAHSQSLDRLMDPLIDQYLYYLNRTQGTTSGTTNQSRLLFSQAGPQSMSLQARNWLPGPCYRQQRLSKTANDNNNSNFPWTAASKYHLNGRDSLVNPGPAMASHKDDEEKFFPMHGNLIFGKEGTTASNAELDNVMITDEEEIRTTNPVATEQYGTVANNLQSSNTAPTTRTVNDQGALPGMVWQDRDVYLQGPIWAKIPHTDGHFHPSPLMGGFGLKHPPPQIMIKNTPVPANPPTTFSPAKFASFITQYSTGQVSVEIEWELQKENSKRWNPEIQYTSNYNKSVNVDFTVDTNGVYSEPRPIGTRYLTRNL

SEQ ID NO: 824 - protein, 736 aa, Artificial Sequence
  Description of Artificial Sequence: Synthetic polypeptide
MAADGYLPDWLEDNLSEGIREWWALKPGVPQPKANQQHQDDRRGLVLPGYKYLGPGNGLDKGEPVNEADAAALEHDKAYDQQLKAGDNPYLKYNHADAEFQERLQEDTSFGGNLGRAVFQAKKRILEPLGLVEEAAKTAPGKKRPVDQSPQEPDSSSGVGKSGKQPARKRLNFGQTGDSESVPDPQPLGEPPAAPTSLGSNTMASGGGAPMADNNEGADGVGNSSGNWHCDSQWLGNRVITTSTRTWALPTYNNHLYKQISSQSGASNDNHYFGYSTPWGYFDFNRFHCHFSPRDWQRLINNNWGFRPKKLSFKLFNIQVKEVTQNDGTTTIANNLTSTVQVFTDSEYQLPYVLGSAHQGCLPPFPADVFMVPQYGYLTLNNGSQAVGRSSFYCLEYFPSQMLRTGNNFQFSYTFEDVPFHSSYAHSQSLDRLMNPLIDQYLYYLNRTQGTTSGTTNQSRLLFSQAGPQSMSLQARNWLPGPCYRQQRLSKTANDNNNSNFPWTAASKYHLNGRDSLVNPGPAMASHKDDEEKFFPMHGNLIFGKEGTTASNAELDNVMITDEEEIRTTNPVATEQYGTVANNLQSSNTAPTTRTVNDQGALPGMVWQDRDVYLQGPIWAKIPHTDGHFHPSPLMGGFGLKHPPPQIMIKNTPVPANPPTTFSPAKFASFITQYSTGQVSVEIEWELQKENSKRWNPEIQYTSNYNKSVNVDFTVDTNGVYSEPRPIGTRYLTRNL

SEQ ID NO: 825 - protein, 736 aa, Artificial Sequence
  Description of Artificial Sequence: Synthetic polypeptide
MAADGYLPDWLEDNLSEGIREWWALKPGVPQPKANQQHQDDRRGLVLPGYKYLGPGNGLDKGEPVNEADAAALEHDKAYDQQLKAGDNPYLKYNHADAEFQERLQEDTSFGGNLGRAVFQAKKRILEPLGLVEEAAKTAPGKKRPVDQSPQEPDSSSGVGKSGKQPARKRLNFGQTGDSESVPDPQPLGEPPAAPTSLGSNTMASGGGAPMADNNEGADGVGNSSGNWHCDSQWLGDRVITTSTRTWALPTYNNHLYKQISSQSGASNDNHYFGYSTPWGYFDFNRFHCHFSPRDWQRLINNNWGFRPKKLSFKLFNIQVKEVTQNDGTTTIANNLTSTVQVFTDSEYQLPYVLGSAHQGCLPPFPADVFMVPQYGYLTLNNGSQAVGRSSFYCLEYFPSQMLRTGNNFQFSYTFEDVPFHSSYAHSQSLDRLMNPLIDQYLYYLNRTQGTTSGTTNQSRLLFSQAGPQSMSLQARNWLPGPCYRQQRLSKTANDNNNSNFPWTAASKYHLNGRDSLVNPGPAMASHKDDEEKFFPMHGNLIFGKEGTTASNAELDNVMITDEEEIRTTNPVATVQYGTVANNLQSSNTAPTTRTVNDQGALPGMVWQDRDVYLQGPIWAKIPHTDGHFHPSPLMGGFGLKHPPPQIMIKNTPVPANPPTTFSPAKFASFITQYSTGQVSVEIEWELQKENSKRWNPEIQYTSNYNKSVNVDFTVDTNGVYSEPRPIGTRYLTRNL

SEQ ID NO: 826 - protein, 735 aa, Artificial Sequence
  Description of Artificial Sequence: Synthetic polypeptide
MAADGYLPDWLEDNLSEGIREWWALKPGVPQPKANQQHQDNRRGLVLPGYKYLGPGNGLDKGEPVNEADAAALEHDKAYDQQLKAGDNPYLKYNHADAEFQERLQEDTSFGGNLGRAVFQAKKGILEPLGLVEEAAKTAPGKKRPVDQSPQEPDSSSGVGKSGKQPARKRLNFGQTGDSESVPDPQPLGEPPAAPTSLGSNTMASGGGAPMADNNEGADGVGNSSGNWHCDSQWLGDRVITTSTRTWALPTYNNHLYKQISSQSGASNDNHYFGYSTPWGYFDFNRFHCHFSPRDWQRLINNNWGFRPKKLSFKLFNIQVKEVTQNDGTTTIANNLTSTVQVFTDSEYQLPYVFGSAHQGCLPPFPADVFMVPQYGYLTLNNGSQAVGRSSFYCLEYFPSQMLRTGNNFQFSYTFEDVPFHSSYAHSQSSDRLMNPLIDQYLYYLNRTQGTTSGTTNQSRLLFSQAGPQSMSLQARNWLPGPCYRQQRLSKTANDNNNSNFPTAASKYHLNGRDSLVNPGPAMASHKDDEEKFFPMHGNLIFGKEGTTASNAELDNVMITDEEEIRTTNPVATEQYGTVANNLQSSNTAPTTRTVNDQGALPGMVWQDRDVYLQGPIWAKIPHTDGHFHPSPLMGGFGLKHPPPQIMIKNTPVPANPPTTFSPAKFASFITQYSTGQVSVEIEWELQKENSKRWNPEIQYTSNYNKSVNVDFTVDTNGVYSEPRPIGTRYLTRNL

SEQ ID NO: 827 - protein, 736 aa, Artificial Sequence
  Description of Artificial Sequence: Synthetic polypeptide
MAADGYLPDWLEDNLSEGIREWWALKPGVPQPKANQQHQDNRRGLVLPGYKYLGPGNGLDEGEPVNEADAAALEHDKAYDQQLKAGDNPYLKYNHADAEFQERLQEDTSFGGNLGRAVFQAKKRILEPLGLVEGAAKTAPGKKRPVDQSPQEPDSSSGVGKSGKQPARKRLNFGQTGDSESVPDPQPLGEPPAAPTSLGSNTMASGGGAPMADNNEGADGVGNSSGNWHCDSQWLGDRVITTSTRTWALPTYNSHLYKQISSQSGASNDNHYFGYSTPWGYFDFNRFHCHFSPRDWQRLINNNWGFRPKKLSFKLFNIQVKEVTQNDGTTTIANNLTSTVQVFTDSEYQLPYVLGSAHQGCLPPFPADVFMVPQYGYLTLNNGSQAVGRSSFYCLEYFPSQMLRTGNNFQFSYTFEDVPFHSSYAHSQSLDRLMNPLIDQYLYYLNRTQGTTSGTTNQSRLLFSQAGPQSMSLQARNWLPGPCYRQQRLSKTANDNNNSNFPWTAASKYHLNGRDSLVNPGPAMASHKDDEEKFFPMHGNLIFGKEGTTASNAELDNVMITDEEEIRTTNPVATEQYGTVANNLQSSNTAPTTRTVNDQGALPGMVWQDRDVYLQGPIWAKIPHTDGHFHPSPLMGGFGLKHPPPQIMIKNTPVPANPPTTFSPAKFASFITQYSTGQVSVEIEWELQKENSKRWNPEIQYTSNYNKSVNVDFTVDTNGVYSEPRPIGTRYLTRNL

SEQ ID NO: 828 - protein, 668 aa, Artificial Sequence
  Description of Artificial Sequence: Synthetic polypeptide
MAADGYLPDWLEDNLSEGIREWWALKPGVPQPKANQQHQDNRRGLVLPGYKYLGPGNGLDKGEPVNEADAAALEHDKAYDQQLKAGDNPYLKYNHADAEFQERLQEDTSFGGNLGRAVFQAKKRILEPLGLVEGAAKTAPGKKRPVDQSPQEPDSSSGVGKSGKQPARKRLNFGQTGDSESVPDPQPLGEPPAAPTSLGSNTMASGGGAPMADNNEGADGVGNSSGNWHCDSQWLGDRVITTSTRTWALPTYNSHLYKQISSQSGASNDNHYFGYSTPWGILTLTDSTATSHHVTGSDSLTTTGDSGPRNSASSSSTSKLKRSRRTMARRLLPITLPARFKCLRTRSISSRTCSGRRTKAVSRRFQRTPSWSLSMDTSPTTEVKRWDAHPFTAWSTSLRRCGLEITSNSAIPSRMYLFTAATLTARVWIAILLLISICTTTERKEQPLEQPTNHGCFLARLGLSLCLCRPEIGYLGPATGNRDFQRLLTTTTTVTFLGQRPANIISMAATRWIQDQLWPVTRTMKKNFSLCTAIRGPYLAWCGKIVTCTFKDLSGQRFLTRMDTFILLLWEALDNIRLLKSSKILRYRQILRRLSARPSLLHLSLSTPLDRSAWKLSGSYRKKTANVGIQRFSTLPTTTSLLMWTLLTLMVFIVNLALLEPGISHETC

SEQ ID NO: 829 - protein, 734 aa, Artificial Sequence
  Description of Artificial Sequence: Synthetic polypeptide
MTDGYLPDWLEDNLSEGVREWWALQPGAPKPKANQQHQDNARGLVLPGYKYLGPGNGLDKGEPVNAADAAALEHDKAYDQQLKAGDNPYLKYNHADAEFQQRLQGDTSFGGNLGRAVFQAKKRVLEPLGLVEQAGETAPGKKRPLIESPQQPDSSTGIGKKGKQPAKKKLVFEDETGAGDGPPEGSTSGAMSDDSEMRAATGGAAVEGGQGADGVGNASGDWHCDSTWSEGHVTTTSTRTWVLPTYNNHLYKRLGESLQSNTYNGFSTPWGYFDFNRFHCHFSPRDWQRLINNNWGMRPKAMRVKIFNIQVKEVTTSNGETTVANNLTSTVQIFADSSYELPYVMDAGQEGSLPPFPNDVFMVPQYGYCGLVTGNTSQQQTDRNAFYCLEYFPSQMLRTGNNFEITYSFEKVPFHSMYAHSQSLDRLMNPLIDQYLWGLQSTTTGTTLNAGTATTNFTKLRPTNLSNFKKNWLPGPSIKQQGFSKTANQNYKIPATGSDSLIKYETHSTLDGRWSALTPGPPMATAGPADSKFSNSQLIFAGPKQNGNTATVPGTLIFTSEEELAATNATDTDMWGNLPGGDQSNSNLPTVDRLTALGAVPGMVWQNRDIYYQGPIWAKIPHTDGHFHPSPLIGGFGLKHPPPQIFIKNTPVPANPATTFSSTPVNSFITQYSTGQVSVQIDWEIQKERSKRWNPEVQFTSNYGQQNSLLWAPDAAGKYTEPRAIGTRYLTHHL

SEQ ID NO: 830 - protein, 734 aa, Artificial Sequence
  Description of Artificial Sequence: Synthetic polypeptide
MTDGYLPDWLEDNLSEGVREWWALQPGAPKPKANQQHQDNARGLVLPGYKYLGPGNGLDKGEPVNAADAAALEHDKAYDQQLKAGDNPYLKYNHADAEFQQRLQGDTSFGGNLGRAVFQAKKRVLEPLGLVEQAGETAPGKKRPLIESPQQPDSSTGIGKKGKQPAKKKLVFEDETGAGDGPPEGSTSGAMSDDSEMRAAAGGAAVEGGQGADGVGNASGDWHCDSTWSEGHVTTTSTRTWVLPTYNNHLYKRLGESLQSNTYNGFSTPWGYFDFNRFHCHFLPRDWQRLINNNWGVRPKAMRVKIFNIQVKEVTTSNGETTVANNLTSTVQIFADSSYELPYVMDAGQEGSLPPFPNDVFMVPQYGYCGLVTGDTSQQQTDRNAFYCLEYFPSQMLRTGNNFEITYSFEKVPFHSMYAHSQSLDRLMNPLIDQYLWGLQSTTTGTTLNAGTATTNFTKLRPTNFSNFKKNWLPGPSIKQQGFSKTANQNYKIPATGSDSLIKYETHSTLDGRWSALTPGPPMATAGPADSKFSNSQLIFAGPKQNGNTATVPGTLIFTSEEELAATNATDTDMWGNLPGGDQSNSNLPTVDRLTALGAVPGMVWQNRDIYYQGPIWAKIPHTDGHFHPSPLIGGFGLKHPPPQIFIKNTPVPANPATTFSSTPVNSFITQYSTGQVSVQIDWEIQKERSKRWNPEVQFTSNYGQQNSLLWAPDAAGKYTEPRAIGTRYLTHHL

SEQ ID NO: 831 - protein, 734 aa, Artificial Sequence
  Description of Artificial Sequence: Synthetic polypeptide
MTDGYLPDWLEDNLSEGVREWWALQPGAPKPKANQQHQDNARGLVLPGYKYLGPGNGLDEGEPVNAADAAALEHDKAYDQQLKAGDNPYLKYNHADAEFQQRLQGDTSFGGNLGRAVFQAKKRVLEPLGLVEQAGETAPGKKRPLIESPQQPDSSTGIGKKGKQPAKKKLVFEDETGAGDGPPEGSTSGAMSDDSEMRAAAGGAAVEGGQGADGVGNASGDWHCDSTWSEGHVTTTSTRTWVLPTYNNHLYKRLGESLQSNTYNGFSTPWGYFDFNRFHCHFSPRDWQRLINNNWGMRPKAMRVKIFNIQVKEVTTSNGETTVANNLTSTVQIFADSSYELPYVMDAGQEGSLPPFPNDVFMVPQYGYCGLVTGNTSQQQTDRNAFYCLEYFPSQMLRTGNNFEITYSFEKVPFHSMYAHSQSLDRLMNPLIDQYLWGLQSTTTGTTLNAGTATTNFTKLRPTNFSNFKKNWLPGPSIKQQGFSKTANQNYKIPATGSDSLIKYETHSTLDGRWSALTPGPPMATAGPADSKFSNSQLIFAGPKQNGNTATVPGTLIFTSEEELAATNATDTDMWGNLPGGDQSNSNLPTVDRLTALGAVPGMVWQNRDIYYQGPIWAKIPHTDGHFHPSPLIGGFGLKHPPPQIFIKNTPVPANPATTFSSTPVNSFITQYSTGQVSVQIDWEIQKERSKRWNPEVQFTSNYGQQNSLLWAPDAAGKYTEPRAIGTRYLTHHL

SEQ ID NO: 832 - protein, 734 aa, Artificial Sequence
  Description of Artificial Sequence: Synthetic polypeptide
MTDGYLPDWLEDNLSEGVREWWALQPGAPKPKANQQHQDNARGLVLPGYKYLGPGNGLDKGEPVNAADAAALEHDKAYDQQLKAGDNPYLKYNHADAEFQQRLQGDTSFGGNLGRAVFQAKKRVLEPLGLVEQAGETAPGKKRPLIESPQQPDSSTGIGKKGKQPAKKKLVFEDGTGAGDGPPEGSTSGAMSDDSEMRAAAGGAAVEGGQGADGVGNASGDWHCDSTWSEGHVTTTSTRTWVLPTYNNHLYKRLGESLQSNTYNGFPTPWGYFDFNRFHCHFSPRDWQRLINNNWGMRPKAMRVKIFNIQVKEVTTSNGETTAANNLTSTVQIFADSSYELPYVMDAGQEGSLPPFPNDVFMVPQYGYCGLVTGNTSQQQTDRNAFYCLEYFPSQMLRTGNNFEITYSFEKVPFHSMYAHSQSLDRLMNPLIDQYLWGLQSTTTGTTLNAGTATTNFTKLRPTNFSNFKKNWLPGPSIKQQGFSKTANQNYKIPATGSDSLIKYETHSTLDGRWSALTPGPPMATAGPADSKFSNSQLIFAGPKQNGNTATVPGTLIFTSEEELAATNATDTDMWGNLPGGDQSNSNLPTVDRLTALGAVPGMVWQNRDIYYQGPIWAKIPHTDGHFHPSPLIGGFGLKHPPPQIFIKNTPVPANPATTFSSTPVNSFITQYSTGQVSVQIDWEIQKERSKRWNPEVQFTSNYGQQNSLLWAPDAAGKYTEPRAIGTRYLTHHL

SEQ ID NO: 833 - protein, 734 aa, Artificial Sequence
  Description of Artificial Sequence: Synthetic polypeptide
MTDGYLPDWLEDNLSEGVREWWALQPGAPKPKANQQHQDNARGLVLPGYKYLGPGNGLDKGEPVNAADAAALEHDKAYDQQLKAGDNPYLKYNHADAEFQQRLQGDTSFGGNLGRAVFQAKKRVLEPLGLVEQAGETAPGKKRPLIESPQQPDSSTGIGKKGKQPAKKKLVFEDETGAGDGPPEGSTSGAMSDDSEMRAAAGGAAVEGGQGADGVGNASGDWHCDSTWSEGHVTTTSTRTWVLPTYNNHLYKRLGESLQSNTYNGFSTPWGYFDFNRFHCHFSPRDWQRLINNNWGMRPKAMRVKIFNIQVKEVTTSNGETTVANNLTSTVQIFADSSYELPYVMDAGQEGSLPPFPNDVFMVPQYGYRGLVTGNTSQQQTDRNAFYCLEYFPSQMLRTGNNFEITYSFEKVPFHSMYAHSQSLDRLMNPLIDQYLWGLQSTTTGTTLNAGTATTNFTKLRPTNFSNFKKNWLPGPSIKQQGFSKTANQNYKIPATGSDSLIKYETHSTLDGRWSALTPGPPMATAGPADSKFSNSQLIFAGPKQNGNTATVPGTLIFTSEEELAATNATDTDMWGNLPGGDQSNSNLPTVDRLTALGAVPGMVWQNRDIYYQGPIWAKIPHTDGHFHPSPLIGGFGLKHPPPQIFIKNTPVPANPATTFSSTPVNSFITQYSTGQVSVQIDWEIQKERSKRWNPEVQFTSNYGQQNSLLWAPDAAGKYTEPRAIGTRYLTHHL

SEQ ID NO: 834 - protein, 734 aa, Artificial Sequence
  Description of Artificial Sequence: Synthetic polypeptide
MTDGYLPDWLEDNLSEGVREWWALQPGAPKPKANQQHQDNARGLVLQGYKYLGPGNGLDKGEPVNAADAAALEHDKAYDQQLKAGDNPYLKYNHADAEFQQRLQGDTSFGGNLGRAVFQAKKRVLEPLGLVEQAGETAPGKKRPLIESPQQPDSSTGIGKKGKQPAKKKLVFEDETGAGDGPPEGSTSGAMSDDSEMRAAAGGAAVEGGQGADGVGNASGDWHCDSTRSEGHVTTTSTRTWVLPTYNNHLYKRLGESLQSNTYNGFSTPWGYFDFNRFHCHFSPRDWQRLINNNWGMRPKAMRVKIFNIQVKEVTTSNGETTVANNLTSTVQIFADSSYELPYVMDAGQEGSLPPFPNDVFMVPQYGYCGLVTGNTSQQQTDRNAFYCLEYFPSQMLRTGNNFEITYSFEKVPFHSMYAHSQSLDRLMNPLIDQYLWGLQSTTTGTTLNAGTATTNFTKLRPTNFSNFKKNWLPGPSIKQQGFSKTANQNYKIPATGSDSLIKYETHSTLDGRWSARTPGPPMATAGPADSKFSNSQLIFAGPKQNGNTATVPGTLIFTSEEELAATNATDTDMWGNLPGGDQSNSNLPTVDRLTALGAVPGMVWQNRDIYYQGPIWAKIPHTDGHFHPSPLIGGFGLKHPPPQIFIKNTPVPANPATTFSSTPVNSFITQYSTGQVSVQIDWEIQKERSKRWNPEVQFTSNYGQQNSLLWAPDAAGKYTEPRAIGTRYLTHHL

SEQ ID NO: 835 - protein, 724 aa, Artificial Sequence
  Description of Artificial Sequence: Synthetic polypeptide
MSFVDHPPDWLEEVGEGLREFLGLEAGPPKPKPNQQHQDQARGLVLPGYNYLGPGNGLDRGEPVNRADEVAREHDISYNEQLEAGDNPYLKYNHADAEFQERLADDTSFGGNLGKAVFQAKKRVLEPFGLVEEGAKTAPTGKRIDDHFPKRKKARTEEDSKPSTSSDAEAGPSGSQQLQIPAQPASSLGADTMSAGGGGPLGDNNQGADGVGNASGDWHCDSTWMGDRVVTKSTRTWVLPSYNNHQYREIKSGSVDGSNANAYFGYSTPWGYFDFNRFHSHWSPRDWQRLINNYWGFRPRSLRVKIFNIQVKEVTVQDSTTTIANNLTSTVQVFTDDDYQLPYVVGNGTEGCLPAFPPQVFTLPQYGYATLNRDNTENPTERSSFFCLEYFPSKMLRTGNNFEFTYNFEEVPFHSSFAPSQNLFKLANPLVDQYLYRFVSTNNTGGVQFNKNLAGRYANTYKNWFPGPMGRTQGWNLGSGVNRASVSAFATTNRMELEGASYQVPPQPNGMTNNLQGSNTYALENTMIFNSQPANPGTTATYLEGNMLITSESETQPVNRVAYNVGGQMATNNQSSTTAPATGTYNLQEIVPGSVWMERDVYLQGPIWAKIPETEAHFHPSPAMGGFGLKHPPPMMLIKNTPVPGNITSFSDVPVSSFITQYSTGQVTVEMEWELKKENSKRWNPEIQYTNNYNDPQFVDFAPDSTGEYRTTRPIGTRYLTRPL

SEQ ID NO: 836 - protein, 724 aa, Artificial Sequence
  Description of Artificial Sequence: Synthetic polypeptide
MSFVDHPPDWLEEVGEGLREFLGLEAGPPKPKPNQQHQDQARGLVLPGYNYLGPGNGLDRGEPVNRADEVAREHDISYNEQLEAGDNPYLKYNHADAEFQEKLADDTSSGGNLGKAVFQAKKRVLEPFGLVEEGAKTAPTGKRIDDHFPKRKKARTEEDSKPSTSSDAEAGPSGSQQLQIPAQPASSLGADTMSAGGGGPLGDNNQGADGVGNASGDWHCDSTWMGDRVVTKSTRTWVLPSYNNHQYREIKSGSVDGSNANAYFGYSTPWGYFDFNRFHSHWSPRDWQRLINNYWGFRPRSLRVKIFNIQVKEVTVQDSTTTIANNLTSTVQVFTDDDYQLPYVVGNGTEGCLPAFPPQVFTLPQYGYATLNRDNTENPTERSSFFCLEYFPSKMLRTGNNFEFTYNFEEVPFHSSFAPSQNLFKLANPLVDQYLYRFVSTNNTGGVQFNKNLAGRYANTYKNWFPGPMGRTQGWNLGSGVNRASVSAFATTNRMELEGASYQVPPQPNGMTNNLQGSNTYALENTMIFNSQPANPGTTATYLEGNMLITSESETQPVNRVAYNVGGQMATNNQSSTTAPATGTYNLQEIVPGSVWMERDVYLQGPIWAKIPETGAHFHPSPAMGGFGLKHPPPMMLIKNTPVPGNITSFSDVPVSSFITQYSTGQVTVEMEWELKKENSKRWNPEIQYTNNYNDPQFVDFAPDSTGEYRTTRPIGTRYLTRPL

SEQ ID NO: 837 - protein, 724 aa, Artificial Sequence
  Description of Artificial Sequence: Synthetic polypeptide
MSFVDHPPDWLEEVGEGLREFLGLEAGPPKPKPNQQHQDQARGLVLPGYNYLGPGNGLDRGEPVNRADEVAREHDISYNEQLEAGDNPYLKYNHADAEFQEKLADDTSFGGNLGKAVFQAKKRVLEPFGLVEEGAKTAPTGKRIDDHFPKRKKARTEEDSKPSTSSDAEAGPSGSQQLQIPAQPASSLGADTMSAGGGGPLGDNNQGADGVGNASGDWHCDSTWMGDRVVTKSTRTWVLPSYNNHQYREIKSGSVDGSNANAYFGYSTPWGYFDFNRFHSHWSPRDWQRLINNYWGFRPRSLRVKIFNIQVKEVTVQDSTTTIANNLTSTVQVFTDDDYQLPYVVGNGTEGCLPAFPPQVFTLPQYGYATLNRDNTENPTERSSFFCLEYFPSKMLRTGNNFEFTYNFEEVPFHSSFAPSQNLFKLANPLVDQYLYRFVSTNNTGGVQFNKNLAGRYANTYKNWFPGPMGRTQGWNLGSGVNRASVSAFATTNRMELEGASYQVPPQPNGMTNNLQGSNTYALENTMIFNSQPANPGTTATYLEGNMLITSESETQPVNRVAYNVGGQMATNNQSSTTAPATGTYNLQEIVPGSVWMERDVYLQGPIWAKIPETGAHFHPSPAMGGFGLKHPPPMMLIKSTPVPGNITSFSDVPVSSFITQYSTGQVTVEMEWELKKENSKRWNPEIQYTNNYNDPQFVDFAPDSTGEYRTTRPIGTRYLTRPL

SEQ ID NO: 838 - protein, 724 aa, Artificial Sequence
  Description of Artificial Sequence: Synthetic polypeptide
MSFVDHPPDWLEEVGEGLREFLGPEAGPPKPKPNQQHQDQARGLVLPGYNYLGPGNGLDRGEPVNRADEVAREHDISYNEQLEAGDNPYLKYNHADAEFQEKLADDTSFGGNLGKAVFQAKKRVLEPFGLVEEGAKTAPTGKRIDDHFPKRKKVRTEEDSKPSTSSDAEAGPSGSQQLQIPAQPASSLGADTMSAGGGGPLGDNNQGADGVGNASGDWHCDSTWMGDRVVTKSTRTWVPPSYNNHQYREIKSGSVDGSNANAYFGYSTPWGYFDFNRFHSHWSPRDWQRLINNYWGFRPRSLRVKIFNIQVKEVTVQDSTTTIANNLTSTVQVFTDDDYQLPYVVGNGTEGCLPAFPPQVFTLPQYGYATLNRDNTENPTERSSFFCLEYFPSKMLRTGNNFEFTYNFEEVPFHSSFAPSQNLFKLANPLVDQYLYRFVSTNNTGGVQFNKNLAGRYANTYKNWFPGPMGRTQGWNLGSGVNRASVSAFATTNRMELEGASYQVPPQPNGMTNNLQGSNTYALENTMIFNSQPANPGTTATYLEGNMLITSESETQPVNRVACNVGGQMATNNQSSTTAPATGTYNLQEIVPGSVWMERDVYLQGPIWAKIPETGAHFHPSPAMGGFGLKHPPPMMLIKNTPVPGNITSFSDVPVSSFITQYSTGQVTVEMEWELKKENSKRWNPEIQYTNNYNDPQFVDFAPDSTGEYRTTRPIGTRYLTRPL

SEQ ID NO: 839 - protein, 724 aa, Artificial Sequence
  Description of Artificial Sequence: Synthetic polypeptide
MSFVDHPPDWLEEVGEGLREFLGLEAGPPKPKPNQQHQDQARGLVLPGYNYLGPGNGLDRGEPVNRADEVAREHDISYNEQLEAGDNPYLKYNHADAEFQEKLADDTSFGGNLGKAVFQAKKRVLEPFGLVEEGAKTAPTGKRIDDHFPKRKKARTEEDSKPSTSSDAEAGPSGSQQLQIPAQPASSLGADTMSAGGGGPLGDNNQGADGVGNASGDWHCDSTWMGDRVVTKSTRTWVLPSYNNHQYREIKSGSVDGSNANAYFGYSTPWGYFDFNRFHSHWSPRDWQRLINNYWGFRPRSLRVKIFNIQVKEVTVQDSTTTIANNLTSTVQVFTDDDYQLPYVVGNGTEGCLPAFPPQVFTLPQYGYATLNRDNTENPTERSSFFCLEYFPSKMLRTGNNFEFTYNFEEVPFHSSFAPSQNLFKLANPLVDQYLYRFVSTNNTGGVQFNKNLAGRYANTYKNWFPGPMGRTQGWNLGSGVNRASVSAFATTNRMELEGASYQVPPQPNGMTNNLQGSNTYALENTMIFNSQPANPGTTATYLEGNMLITSESETQPVNRVAYNVGGQMATNNQSSTTAPATGAYNLQEIVPGSVWMERDVYLQGPIWAKIPETGAHFHPSPAMGGFGLKHPPPMMLIKNTPVPGNITSFSDVPVSSFITQYSTGQVTVEMEWELKKENSKRWNPEIQYTNNYNDPQFVDFAPDSTGEYRTTRPIGTRYLTRPL

SEQ ID NO: 840 - protein, 724 aa, Artificial Sequence
  Description of Artificial Sequence: Synthetic polypeptide
MSFVDHPPDWLEEVGEGLREFLGLEAGPPKPKPNQQHQDQARGLVLPGYNYLGPGNGLDRGEPVNRADGVAREHDISYNEQLEAGDNPYLKYNHADAEFQEKLADDTSFGGNLGKAVFQAKKRVLEPFGLVEEGAKTAPTGKRIDDHFPKRKKARTEEDSKPSTSSDAEAGPSGSQQLQIPAQPASSLGADTMSAGGGGPLGDNNQGADGVGNASGDWHCDSTWMGDRVVTKSTRTWVLPSYNNHQYREIKSGSVDGSNANAYFGYSTPWGYFDFNRFHSHWSPRDWQRLINNYWGFRPRSLRVKIFNIQVKEVTVQDSTTTIANNLTSTVQAFTDDDYQLPYVVGNGTEGCLPAFPPQVFTLPQYGYATLNRDNTENPTERSSFFCLEYFPSKMLRTGNNFEFTYNFEEVPFHSSFAPSQNLFKLANPLVDQYLYRFVSTNNTGGVQFNKNLAGRYANTYKNWFPGPMGRTQGWNLGSGVNRASVSAFATTNRMELEGASYQVPPQPNGMTNNLQGSNTYALENTMIFNSQPANPGTTATYLEGNMLITSESETQPVNRVAYNVGGQMATNNQSSTTAPATGTYNLQEIVPGSVWMERDVYLQGPIWAKIPETGAHFHPSPAMGGFGLKHPPPMMLIKNTPVPGNITSFSDVPVSSFITQYSTGQVTVEMEWELKKENSKRWNPEIQYTNNYNDPQFVDFAPDSTGEYRTTRPIGTRYLTRPL

SEQ ID NO: 841 - protein, 723 aa, Artificial Sequence
  Description of Artificial Sequence: Synthetic polypeptide
MSFVDHPPDWLEEVGEGLREFLGLEAGPPKPKPNQQHQDQARGLVLPGYNYLGPGNGLDRGEPVNRADEVAREHDISYNEQLEAGDNPYLKYNHADAEFQEKLADDTSFGGNLGKAVFQAKKRVLEPFGLVEEGAKTAPTGKRIDDHFPKRKKARTEEDSKPSTSSDAEAGPSGSQQLQIPAQPASSLGADTMSAGGGGPLGDNNQGADGVGNASGDWHCDSTWMGDRVVTKSTRTWVLPSYNNHQYREIKSGSVDGSNANAYFGYSTPWGYFDFNRFHSHWSPRDWQRLINNYWGFRPRSLRVKIFNIQVKEVTVQDSTTTIANNLTSTVQVFTDDDYQLPYVVGNGTEGCLPAFPPQVFTLPQYGYATLNRDNTENPTERSSFFCLEYFPSKMLRTGNNFEFTYNFEEVPFHSSFAPSQNLFKLANPLVDQYLYRFVSTNNTGGVQFNKNLAGRYANTYKNWFPGPMGRTQGWNLGSGVNRASVSAFATTNRMELEGASYVPPQPNGMTNNLQGSNTYALENTMIFNSQPANPGTTATYLEGNMLITSESETQPVNRVAYNVGGQMATNNQSSTTAPATGTYNLQEIVPGSVWMEGDVYLQGPIWAKIPETGAHFHPSPAMGGFGLKHPPPMMLIKNTPVPGNITSFSDVPVSSFITQYSTGQVTVEMEWELKKENSKRWNPEIQYTNNYNDPQFVDFAPDSTGEYRTTRPIGTRYLTRPL

SEQ ID NO: 842 - protein, 724 aa, Artificial Sequence
  Description of Artificial Sequence: Synthetic polypeptide
MSFVDHPPDWLEEVGEGLREFLGLEAGPPKPKPNQQHQDQARGLVLPGYNYLGPGNGLDRGEPVNRADEVAREHDISYNEQLEAGDNPYLKYNHADAEFQEKLADDTSFGGNLGKAVFQAKKRVLEPFGLVEEGAKTAPTGKRIDDHFPKRKKVRTEEDSKPSTSSDAEAGPSGSQQLQIPAQPASSLGADTMSAGGGGPLGDNNQGADGVGNASGDWHCDSTWMGDRVVTKSTRTWVLPSYNNHQYREIKSGSVDGSNANAYFGYSTPWGYFDFNRFHSHWSPRDWQRLINNYWGFRPRSLRVKIFNIQVKEVTVQDSTTTIANNLTSTVQVFTDDDYQLPYVVGNGTEGCLPAFPPQVFTLPQYGYATLNRDNTENPTERSSFFCLEYFPSKMLRTGNNFEFTYNFEEVPFHSSFAPSQNLFKLANPLVDQYLYRFVSTNNTGGVQFNKNLAGRYANTYKNWFPGPMGRTQGWNLGSGVNRASVSAFATTNRMELEGASYQVPPQPNGMTNNLQGSNTYALENTMIFNSQPANPGTTATYLEGNMLITSESETQPVNRVAYNVGGQMATNNQSSTTAPATGTYNLQEIVPGSVWMERDVYLQGPIWAKIPETGAHFHPSPAMGGFGLKHPPPMMLIKNTPVPGNITSFSDVPVSSFITQYSTGQVTVEMEWELKKENSERWNPEIQYTNNYNDPQFVDFAPDSTGEYRTTRPIGTRYLTRPL

SEQ ID NO: 843 - protein, 724 aa, Artificial Sequence
  Description of Artificial Sequence: Synthetic polypeptide
MSFVDHPPDWLEEVGEGLREFLGLEAGPPKPKPNQQHQDQARGLVLPGYNYLGPGNGLDRGEPVNRADEVAREHDISYSEQLEAGDNPYLKYNHADAEFQEKLADDTSFGGNLGKAVFQAKKRVLEPFGLVEEGAKTAPTGKRIDDHFPKRKKARTEEDSKPSTSSDAEAGPSGSQQLQIPAQPASSLGADTMSAGGGGPLGDNNQGADGVGNASGDWHCDSTWMGDRVVTKSTRTWVLPSYNNHQYREIKSGSVDGSNANAYFGYSTPWGYFDFNRFHSHWSPRDWQRLINNYWGFRPRSLRVKIFNIQVKEVTVQDSTTTIANNLTSTVQVFTDDDYQLPYVVGNGTEGCLPAFPPQVFTLPQYGYATLNRDNTENPTERSSFFCLEYFPSKMLRTGNNFEFTYNFEEVPFHSSFAPSQNLFKLANPLVDQYLYRFVSTNNTGGVQFNKNLAGRYANTYKNWFPGPMGRTQGWNLGSGVNRASVSAFATTNRMELEGASYQVPPQPNGMTNNLQGSNTYALENTMIFNSQPANPGTTATYLEGNMLITSESETQPVNRVAYNVGGQMATNNQSSTTAPATGTYNLQEIVPGSVWMERDVYLQGPIWAKIPETGAHFHPSPAMGGFGLKHPPPMMLIKNTPVPGNITSFSDVPVSSFITQYSTGQVTVEMEWELKKENSKRWNPEIQYTNNYNDPQFVDFAPDSTGEYRTARPIGTRYLTRPL

SEQ ID NO: 844 - protein, 724 aa, Artificial Sequence
  Description of Artificial Sequence: Synthetic polypeptide
MSFVDHPPDWLEEVGEGLREFLGPEAGPPKPKPNQQHQDQARGLVLPGYNYLGPGNGLDRGEPVNRADEVAREHDISYNEQLEAGDNPYLKYNHADAEFQEKLADDTSFGGNLGKAVFQAKKRVLEPFGLVEEGAKTAPTGKRIDDHFPKRKKARTEEDSKPSTSSDAEAGPSGSQQLQIPAQPASSLGADTMSAGGGGPLGDNNQGADGVGNASGDWHCDSTWMGDRVVTKSTRTWVLPSYNNHQYREIKSGSVDGSNANAYFGYSTPWGYFDFNRFHSHWSPRDWQRLINNYWGFRPRSLRVKIFNIQVKEVTVQDSTTTIANNLTSTVQVFTDDDYQLPYVVGNGTEGCLPAFPPQVFTLPQYGYATLNRDNTENPTERSSFFCLEYFPSKMLRTGNNFEFTYNFEEVPFHSSFAPSQNLFKLANPLVDQYLYRFVSTNNTGGVQFNKNLAGRYANTYKNWFPGPMGRTQGWNLGSGVNRASVSAFATTNRMELEGASYQVPPQPNGMTNNLQGSNTYALENTMIFNSQPANPGTTATYLEGNMLITSESETQPVNRVAYNVGGQMTTNNQSSTTAPATGTYNLQEIVPGSVWMERDVYPQGPIWAKIPETGAHFHPSPAMGGFGLKHPPPMMLIKNTPVPGNITSFSDVPVSSFITQYSTGQVTVEMEWELKKENSKRWNPEIQYTNNYNDPQFVDFAPDSTGEYRTTRPIGTRYLTRPL

SEQ ID NO: 845 - protein, 724 aa, Artificial Sequence
  Description of Artificial Sequence: Synthetic polypeptide
MSFVDHPPDWLEEVGEGLREFLGLEAGPPKPKPNQQHQDQARGLVLPGYNYLGPGNGLDRGEPVNRADEVAREHDISYNEQLEAGDNPYLKYNHADAEFQEKLADDTSFGGNLGKAVFQAKKRVLEPFGLVEEGAKTAPTGKRIDDHFPKRKKARTEEDSKPSTSSDAEAGPSGSQQLQIPAQPASSLGADTMSAGGGGPLGDNNQGADGVGNASGDWHCDSTWMGDRVVTKSTRTWVLPSYNNHQYREIKSGSVDGSNANAYFGYSTPWGYFDFNRFHSHWSPRDWQRLINNYWGFRPRSLRVKIFNIQVKEVTVQDSTTTIANNLTSTVQVFTDDDYQLPYVVGNGTEGCLPAFPPQVFTLPQYGYATLNRDNTENPTERSSFLCLEYFPSKMLRTGNNFEFTYNFEEVPFHSSFAPSQNLFKLANPLVDQYLYRFVSTNNTGGVQFNKNLAGRYANTYKNWFPGPMGRTQGWNLGSGVNRASVSAFATTNRMELEGASYQVPPQPNGMTNNLQGSNTYALENTMIFNSQPANPGTTATYLEGNMLITSESETQPVNRVAYNVGGQMATNNQSSTTAPATGTYNLQEIVPGSVWMKRDVYLQGPIWAKIPETGAHFHPSPAMGGFGLKHPPPMMLIKNTPVPGNITSFSDVPVSSFITQYSTGQVTVEMEWELKKENSKRWNPEIQYTNNYNDPQFVDFAPDSTGEYRTTRPIGTRYLTRPL

SEQ ID NO: 846 - protein, 724 aa, Artificial Sequence
  Description of Artificial Sequence: Synthetic polypeptide
MSFVDHPPDWLEEVGEGLREFLGLEAGPPKPKPNQQHQDQARGLVLPGYNYLGPGNGLDRGEPVNRADEVAREHDISYNEQLEAGDNPYLKYNHADAEFQEKLADDTSFGGNLGKAVFQAKKRVLEPFGLVEEGAKTAPTGKRIDDHFPKRKKARTEEDSKPSTPSDAEAGPSGSQQLQIPAQPASSLGADTMSAGGGGPLGDNNQGADGVGNASGDWHCDSTWMGDRVVTKSTRTWVLPSYNNHQYREIKSGSVDGSNANAYFGYSTPWGYFDFNRFHSHWSPRDWQRLINNYWGFRPRSLRVKIFNIQVKEVTVQDSTTTIANNLTSTVQVFTDDDYQLPYVVGNGTEGCLPAFPPQVFTLPQYGYATLNRDNTENPTERSSFFCLEYFPSKMLRTGNNFEFTYNFEEVPFHSSFAPSQNLFKLANPLVDQYLYRFVSTNNTGGVQFNKNLAGRYANTYKNWFPGPMGRTQGWNLGSGVNRASVSAFATTNRMELEGASYQVPPQPNGMTNNLQGSNTYALENTMIFNSQPANPGTTATYLEGNMLITSESETQPVNRVAYNVGGQMATNNQSSTTAPATGTYNLQEIVPGSVWMERDVYLQGPIWAKIPETGAHFHPSPAMGGFGLKHPPPMMLIKNTPVPGNITSFSDVPVSSFITQYSTGQVTVEMEWELKKENSKRWNPEIQYTNNYNDPQFVDFAPDSTGEYRTTRPIGTRYLTRPL

SEQ ID NO: 847 - protein, 724 aa, Artificial Sequence
  Description of Artificial Sequence: Synthetic polypeptide
MSFVDHPPDWLEEVGEGLREFLGLEAGPPKPKPNQQHQDQARGLVLPGYNYLGPGNGLDRGEPVNRADEVAREHDISYNEQLEAGDNPYLKYNHADAEFQEKLADDTSFGGNLGKAVFQAKKRVLEPFGLVEEGAKTAPTGKRIDDHFPKRKKARTEEDSKPSTSSDAEAGPSGSQQLQIPAQPASSLGADTMSAGGGGPLGDNNQGADGVGNASGDWHCDSTWMGDRVVTKSTRTWVLPSYNNHQYREIKSGSVDGSNANAYFGYSTPWGYFDFNRFHSHWSPRDWQRLINNYWGFRPRSLRVKIFNIQVKEVTVQDSTTTIANNLTSTVQVFTDDDYQLPYVVGNGTEGCLPAFPPQVFTLPQYGYATLNRDNTENPTERSSFFCLEYFPSKMLRTGNNFEFTYNFEEVPFHSSFAPSQNLFKLANPLVDQYLYRFVSTNNTGGVQFNKNLAGRYANTHKNWFPGPMGRTQGWNLGSGVNRASVSAFATTNRMELEGASYQVPPQSNGMTNNLRGSNTYALENTMIFNSQPANPGTTATYLEGNMLITSESETQPVNRVAYNVGGQMATNNQSSTTAPATGTYNLQEIVPGSVWMERDVYLQGPIWAKIPETGAHFHPSPAMGGFGLKHPPPMMLIKNTPVPGNITSFSDVPVSSFITQYSTGQVTVEMEWELKKENSKRWNPEIQYTNNYNDPQFVDFAPDSTGEYRTTRPIGTRYLTRPL

SEQ ID NO: 848 - protein, 724 aa, Artificial Sequence
  Description of Artificial Sequence: Synthetic polypeptide
MSFVDHPPDWLEEVGEGLREFLGLEAGPPKPKPNQQHQDQARGLVLPGYNYLGPGNGLDRGEPVNRADEVAREHDISYNEQLEAGDNPYLKYNHADAEFQEKLADDTSFGGNLGKAVFQAKKRVLEPFGLVEEGAKTAPTGKRIDDHFPKRKKARTEEDSKPSTSSDAEAGPSGSQQLQIPAQPASSLGADTMSAGGGGPLGDNNQGADGVGNASGDWHCDSTWMGDRVVTKSTRTWVLPSYNNHQYREIKSGSVDGSNANAYFGYSTPWGYFDFNRFHSHWSPRDWQRLINNYWGFRPRSLRVKIFNIQVKEVTVQDSTTTIANNLTSTVQVFTDDDYQLPYVVGNGTEGCLPAFPPQVFTLPQYGYATLNRDNTENPTERSSFFCLEYFPSKMLRTGNNFEFTYNFEEVPFHSSFAPSQNLFKLANPLVDQYLYRFVSTNNTGGVQFNKNLAGRYANTYKNWFPGPMGRTQGWNLGSGVNRASVSAFATTNRMELEGASYQVPPQPNGMTNNLQGSNTYALENTMIFNSQPANPGTTATYLEGNMLITSESETQPVNRVAYSVGGQMATNNQSSTTAPTTGTYNLQEIVPGSVWMERDVYLQGPIWAKIPETGAHFHPSPAMGGFRLKHPPPMMLIKNTPVPGNITSFSDVPVSSFITQYSTGQVTVEMEWELKKENSKRWNPEIQYTNNYNDPQFVDFAPDSTGEYRTTRPIGTRYLTRPL

SEQ ID NO: 849 - protein, 724 aa, Artificial Sequence
  Description of Artificial Sequence: Synthetic polypeptide
MSFVDHPPDWLEEVGEGLREFLGLEAGPPKPKPNQQHQDQARGLVLPGYNYLGPGNGLDRGEPVNRADEVAREHDISYNEQLEAGDNPYLKYNHADAEFQEKLADDTSFGGNLGKAVFQAKKRVLEPFGLVEEGAKTAPTGKRIDDHFPKRKKARTEEDSKPSTSSDAEAGPSGSQQLQIPAQPASSLGADTMSAGGGGPLGDNNQGADGVGNASGDWHCDSTWMGDRVVTKSTRTWVLPSYNNHQYREIKSGSVDGSNANAYFGYSTPWGYFDFNRFHSHWSPRDWQRLINNYWGFRPRSLRVKIFNIQVKEVTVQDSTTTIANNLTSTVQVFTDDDYQLPYVVGNGTEGCLPAFPPQVFTLPQYGYATLNRDNTENPTERSSFFCLEYFPSKMLRTGNNFEFTYNFEEVPFHSSFAPSQNLFKLANPLVDQYLYRFVSTNNTGGVQFNKNLAGRYANTYKNWFPGPMGRTQGWNLGSGVNRASVSAFAATNRMELEGASYQVPPQPNGMTNNLQGSNTYALENTMIFNSQPANPGTTATYLEGNMLITSESETQPVNRVAYNVGGQMATNNQSSTTAPATGTYNLQEIVPGGVWMERDVYLQGPIWAKIPETGAHFHPSPAMGGFGLKHPPPMMLIKNTPVPGNTTSFSDVPVSSFITQYSTGQVTVEMEWELKKENSKRWNPEIQYTNNYNDPQFVDFAPDSTGEYRTTRPIGTRYLTRPL

SEQ ID NO: 850 - protein, 724 aa, Artificial Sequence
  Description of Artificial Sequence: Synthetic polypeptide
MSFVDHPPDWLEEVGEGLREFLGLEAGPPKPKPNQQHQDQARGLVLPGYNYLGPGNGLDRGEPVNRADEVAREHDISYNEQLEAGDNPYLKYNHADAEFQEKLADDTSFGGNLGKVVFQAKKRVLEPFGLVEEGAKTAPTGKRIDDHFPKRKKARTEEDSKPSTSSDAEAGPSGSQQLQIPAQPASSLGADTMSAGGGGPLGGNNQGADGVGNASGDWHCDSTWMGDRVVTKSTRTWVLPSYNNHQYREIKSGSVDGSNANAYFGYSTPWGYFDFNRFHSHWGPRDWQRLINNYWGFRPRSLRVKIFNIQVKEVTVQDSTTTIANNLTSTVQVFTDDDYQLPYVVGNGTEGCLPAFPPQVFTLPQYGYATLNRDNTENPTERSSFFCLEYFPSKMLRTGNNFEFTYNFEEVPFHSSFAPSQNLFKLANPLVDQYLYRFVSTNNTGGVQFNKNLAGRYANTYKNWFPGPMGRTQGWNLGSGVNRASVSALATTNRMELEGASYQVPPQPNGMTNNLQGSNTYALENTMIFNSQPANPGTTATYLEGNMLITSESETQPVNRVAYNVGGQMATNNQSSTTAPATGTYNLQEIVPGSVWMERDVYLQGPIWAKIPETGAHFHPSPAMGGFGLKHPPPMMLIKNTPVPGNITSFSDVPVSSFITQYSTGQVTVEMEWELKKENSKRWNPEIQYTNNYNDPQFVDFAPDSTGEYRTTRPIGTRYLTRPL

SEQ ID NO: 851 - protein, 723 aa, Artificial Sequence
  Description of Artificial Sequence: Synthetic polypeptide
MSFVDHPPDWLEEVGEGLREFLGLEAGPPKPKPNQQHQDQARGLVLPGYNYLGPGNGLDRGEPVNRADEVAREHDISYNEQLEAGDNPYLKYNHADAEFQEKLADDTSFGGNLGKAVFQAKKRVLEPFGLVEEGAKTAPTGKRIDDHFPKRKKARTEEDSKPSTSSDAEAGPSGSQQLQIPAQPASSLGADTMSAGGGGPLGDNNQGADGVGNASGDWHCDSTWMGDRVVTKSTRTWVLPSYNNHQYREIKSGSVDGSNANAYFGYSTPWGYFDFNRFHSHWSPRDWQRLINNYWGFRPRSLRVKIFNIQVKEVTVQDSTTTIANNLTSTVQVFTDDDYQLPYVVGNGTEGCLPAFPPQVFTLPQYGYATLNRDNTENPTERSSFFCLEYFPSKMLRTGNNFEFTYNFEEVPFHSSFAPSQNLFKLANPLVDQYLYRFVSTNNTGGVQFNKNLAGRYANTYKNWFPGPMGRTQGWNLGSGVNRASVSAFATTNRMELEGASYQVPPQPNGMTNNLQGSNTYALENTMIFNSQPANPGTTATYLEGNMLITSESETQPVNRVAYNVGGQMATNNQSSTTAPATGTYNLQEIVPGSVWMERDVYLQGPIAKIPETGAHFHPSPAMGGFGLKHPPPMMLIKNTPVPGNITSFSDVPVSSFITQYSTGQVTVEMEWELKKENSKRWNPEIQYTNNYNDPQFVDFAPDSTGECRTTRPIGTRYLTRPL

SEQ ID NO: 852 - protein, 724 aa, Artificial Sequence
  Description of Artificial Sequence: Synthetic polypeptide
MSFVDHPPDWLEEVGEGLREFLGLEAGPPKPKPNQQHQDQARGLVLPGYNYLGPGNGLDRGEPVNRADEVAREHDISYNEQLEAGDNPYLKYNHADAEFQEKLADDTSFGGNLGKAVFQAKKRVLEPFGLVEEGAKTAPTGKRIDDHFPKRKKARTEEDSKPSTSSDAEAGPSGSQQLQIPAQPASSLGADTMSAGGGGPLGDNNQGADGVGNASGDWHCDSTWMGDRVVTKSTRTWVLPSYNNHQYREIKSGSVDGSNANAYFGYSTPWGYFDFNRFHSHWSPRDWQRLINNYWGFRPRSLRVKILNIQVKEVTVQDSTTTIANNLTSTVQVFTDDDYQLPYVVGNGTEGCLPAFPPQVFTLPQYGYATLNRDNTENPTERSSFFCLEYFPSKMLRTGNNFEFTYNFEEVPFHSSFAPSQNLFKLANPLVGQYLYRFVSTNNTGGVQFNENLAGRYANTYKNWFPGPMGRTQGWNLGSGVNRASVSAFATTNRMELEGASYQVPPQPNGMTNNLQGSNTYALENTMIFNSQPANPGTTATYLEGNMLITSESETQPVNRVAYNVGGQMATNNQSSTTAPATGTYNLQEIVPGSVWMERDVYLQGPIWAKIPETGAHFHPSPAMGGFGLKHPPPMMLIKNTPVPGNITSFSDVPVSSFITQYSTGQATVEMEWELKKENSKRWNPEIQYTNNYNDPQFVDFAPDSTGEYRTTRPIGTRYLTRPL

SEQ ID NO: 853 - protein, 724 aa, Artificial Sequence
  Description of Artificial Sequence: Synthetic polypeptide
MSFVDHPPDWLEEVGEGLREFLGLEAGPPKPKPNQQHQDQARGLVLPGYNYLGPGNGLDRGEPVNRADEVAREHDISYNEQLEAGDNPYLKYNHADAEFQEKLADDTSFGGNLGKAVFQAKKRVLEPFGLVEEGAKTAPTGKRIDDHFPKRKKARTEEDSKPSTSSDAEAGPSGSQQLQIPAQPASSLGADTMSAGGGGPLGDNNQGADGVGNASGDWHCDSTWMGDRVVTKSTRTWVLPSYNNHQYREIKSGSVDGSNANAYFGYSTPWGYFDFNRFHSHWSPRDWQRLINNYWGFRPRSLRVKIFNIQVKEVTVQDSTTIIANNLTSTVQVFTDDDYQLPYVVGNGTEGCLPAFPPQVFTLPQYGYATLNRDNTENPTERSSFFCLEYFPSKMLRTGNNFEFTYNFEEVPFHSSFAPSQNLFKLANPLVDQYLYRFVSTNNTGGVQFNKNLAGRYANTYKNWFPGPMGRTQGWNLGSGVNRASVSAFATTNRMELEGASYQVPPQPNGMTNNLQGSNTYALENTMIFNSQPANPGTTATYLEGNMLITSESETQPVNRVAYNVGGQMATNNQSSTTAPATGTYNLQEIVPGSVWMERDVYLQGPIWAKIPETGAHFHPSPAMGGFGLKHPPPMMLIKNTPVPGNITSFSDVPVSSFITQYSTGQVTVEMEWELKKENSKRWNPEIQYTNNYNDPQFVDFAPDSTGEYRTTRPIGTRYLTRPL

SEQ ID NO: 854 - protein, 724 aa, Artificial Sequence
  Description of Artificial Sequence: Synthetic polypeptide
MSFVDHPPDWLEEVGEGLREFLGLEAGPPKPKPNQQHQDQARGLVLPGYNYLGPGNGLDRGEPVNRADEVAREHDISYNEQLEAGDNPYLKYNHADAEFQEKLADDTSFGGNLGKAVFQAKKRVLEPFGLVEEGAKTAPTGKRIDDHFPKRKKARTEEDSKPSTSSDAEAGPSGSQQLQIPAQPASSLGADTMSAGGGGPLGDNNQGADGVGNASGDWHCDSTWMGDRVVTKSTRTWVLPSYNNHQYREIKSGSVDGSNANAYFGYSTPWGYFDFNRFHSHWSPRDWQRLINNYWGFRPRSLRVKIFNIQVKEVTVQDSTTTIANNLTSTVQVFTDDDYQLPYVVGNGTEGCLPAFPPQVFTLPQYGYATLNRDNTENPTERSSFFCLEYFPSKMLRTGNNFEFTYNFEEVPFHSSFAPSQNLFKLANPLVDQYLYRFVSTNNTGGVQFNKNLAGRYANTYKNWFPGPMGRTQGWNLGSGVNRASVSAFATTNRMELEGASYQVPPQPNGMTNNLQGSNTYALENTMIFNSQPANPGTTATYLEGNMLITSESETQPVNRVAYNVGGQMATNNQSSTTAPATGTYNLQEIVPGSVWMERDVYLQGPIWAKIPETGAHFHPSPAMGGFGLKHPPPMMLIKNTPVPGNITSLSDVPVSSFITQYSTGQVTVEMEWELKKENSKRWNPEIQYTNNYNDPQFVDFAPDSTGEYRTTRPIGTRYLTRPL

SEQ ID NO: 855 - protein, 724 aa, Artificial Sequence
  Description of Artificial Sequence: Synthetic polypeptide
MSFVDHPPDWLEEVGEGLREFLGLEAGPPKPKPNQQHQDQARGLVLPGYNYLGPGNGLDRGEPANRADEVAREHDISYNEQLEAGDNPYLKYNHAGAEFQEKLADDTSFGGNLGKAVFQAKKRVLEPFGLVEEGAKTAPTGKRIDDHFPKRKKARTEEDSKPSTSSDAEAGPSGSQQLQIPAQPASSLGADTMSAGGGGPLGDNNQGADGVGNASGDWHCDSTWMGDRVVTKSTRTWVLPGYNNHQYREIKSGSVDGSNANAYFGYSTPWGYFDFNRFHSHWSPRDWQRLINNYWGFRPRSLRVKIFNIQVKEVTVQDSTTTIANNLTSTVQVFTDDDYQLPYVVGNGTEGCLPAFPPQVFTLPQYGYATLNRDNTENPTERSSFFCLEYFPSKMLRTGNNFEFTYNFEEVPFHSSFAPSQNLFKLANPLVDQYLYRFVSTNNTGGVQFNKNLAGRYANTYKNWFPGPMGRTQGWNLGSGVNRASVSAFATTNRMELEGASYQVPPQPNGMTNNLQGSNTYALENTMIFNSQPANPGTTATYLEGNMLITSESETQPVNRVAYNVGGQMATNNQSSTTAPATGTYNLQEIVPGSVWMERDVYLQGPIWAKIPETGAHFHPSPAMGGFGLKHPPPMMLIKNTPVPGNITSFSDVPVSSFITQYSTGQVTVEMEWELKKENSKRWNPEIQYTNNYNDPQFVDFAPDSTGEYRTTRPIGTRYLTRPL

SEQ ID NO: 856 - protein, 724 aa, Artificial Sequence
  Description of Artificial Sequence: Synthetic polypeptide
MSFVDHPPDWLEEVGEGLREFLGLEAGPPKPKPNQQHQDQARGLVLPGYNYLGPGNGLDRGEPVNRADEVAREHDISYNEQLEAGDNPYLKYNHADAEFQEKLADDTSFGGNLGKAVFQAKKRVLEPFGLVEEGAKTAPTGKRIDDHFPKRKKARTEEDSKPPTSSDAEAGPSGSQQLQIPAQPASSLGADTMSAGGGGPLGDNNQGADGVGNASGDWHCDSTWMGDRVVTKSTRTWVLPSYNNHQYREIKSGSVDGSNANAYFGYSTPWGYFDFNRFHSHWSPRDWQRLINNYWGFRPRSLRVKIFNIQVKEVTVQDSATTIANNLTSTVQVFTDDDYQLPYVVGNGTEGCLPAFPPQVFTLPQYGYATLNRDNTENPTERSSFFCLEYFPSKMLRTGNNFEFTYNFEEVPFHSSFAPSQNLFKLANPLVDQYLYRFVSTNNTGGVQFNKNLAGRYANTYKNWFPGPMGRTQGWNLGSGVNRASVSAFATTNRMELEGASYQVPPQPNGMTNNLQGSNTYALENTMIFNSQPANPGTTATYLEGNMLITSESETQPVNRVAYNVGGQMATNNQSSTTAPATGTYNLQEIVPGSVWMERDVYLQGPIWAKIPETGAHFHPSPAMGGFGLKHPPPMMLIKNTPVPGNITSFSDVPVSSFITQYSTGQVTVEMEWELKKENSKRWNPEIQYTNNYNDPQFVDFAPDSTGEYRTTRPIGTRYLTRPL

SEQ ID NO: 857 - protein, 724 aa, Artificial Sequence
  Description of Artificial Sequence: Synthetic polypeptide
MSFVDHPPDWLEEVGEGLREFLGLEAGPPKPKPNQQHQDQARGLVLPGYNYLGPGNGLDRGEPVNRADEVAREHDISYNEQLEAGDNPYLKYNHADAEFQEKLADDTSFGGNLGKAVFQAKKRVLEPFGLVEEGAKTAPTGKRIDDHFPKRKKARTEEDSKPSTSSDAEAGPSGSQQPQIPAQPASSLGADTMSAGGGGPLGDNNQGADGVGNASGDWHCDSTWMGDRVVTKSTRTWVLPSYNNHQYREIKSGSVDGSNANAYFGYSTPWGYFDFNRFHSHWSPRDWQRLINNYWGFRPRSLRVKIFNIQVKEVTVQDSTTTIANNLTSTVQVFTDDDYQLPYVVGNGTEGCLPAFPPQVFTLPQYGYATLNRDNTENPTERSSFFCLEYFPSKMLRTGNNFEFTYNFEEVPFHSSFAPSQNLFKLANPLVDQYLYRFVSTNNTGGVQFNKNLAGRYANTYKNWFPGPMGRTQGWNLGSGVNRASVSAFATTNRMELEGASYQVPPQPNGMTNNLQGSNTYALENTMIFNSQPANPGTTATYLEGNMLITSESETQPVNRVAYNVGGQMATNNQSSTTAPATGTYNLQEIVPGSVWMERDVYLQGPIWAKIPETGAHFHPSPAMGGFGLKHPPPMMLIKNTPAPGNITSFSDVPVSSFITQYSTGQVTVEMEWELKKENSKRWNPEIQYTNNYNDPQFVDFAPDSTGEYRTTRPIGTRYLTRPL

SEQ ID NO: 858 - protein, 724 aa, Artificial Sequence
  Description of Artificial Sequence: Synthetic polypeptide
MSFVDHPPDWLEEVGEGLREFLGLEAGPPKPKPNQQHQDQARGLVLPGYNYLGPGNGLDRGEPVNRADEVAREHDISYNEQLEAGDNPYLKYNHADAEFQEKLADDTSFGGNLGKAVFQAKKRVLEPFGLVEEGAKTAPTGKRIDDHFPKRKKARTEEDSKPPTSSDAEAGPSGSQQLQIPAQPASSLGADTMSAGGGGPLGDNNQGADGVGNASGDWHCDSTWMGDRVVTKSTRTWVLPSYNNHQYREIKSGSVDGSNANAYFGYSTPWGYFDFNRFHSHWSPRDWQRLINNYWGFRPRSLRVKIFNIQVKEVTVQDSTTTIANNLTSTVQVFTDDDYQLPYVVGNGTEGCLPAFPPQVFTLPQYGYATLNRDNTENPTERSSFFCLEYFPSKMLRTGNNFEFTYNFEEVPFHSSFAPSQNLFKLANPLVDQYLYRFVSTNNTGGVQFNKNLAGRYANTYKNWFPGPMGRTQGWNLGSGVNRASVSAFATTNRMELEGASYQVPPQPNGMTNNLQGSNTYALENTMIFNSQPANPGTTATYLEGNMLITSESETQPVNRVAYNVGGQMATNNQSSTTAPATGTYNLQEIVPGSVWMERDVYLQGPIWAKIPETGAHFHPSPAMGGFGLKHPPPMMLIKNTPVPGNITSFSDVPVSSFITQYSTGQVTVEMEWELKKENSKRWNPEIQYTNNYNDPQFVDFAPDSTGEYRTTRPIGTRYLTRPL

SEQ ID NO: 859 - protein, 724 aa, Artificial Sequence
  Description of Artificial Sequence: Synthetic polypeptide
MSFVDHPPDWLEEVGEGLREFLGLEAGPPKPKPNQQHQDQARGLVLPGYNYLGPGNGLDRGEPVNRADEVAREHDISYNEQLEAGDNPYLKYNHADAEFQEKLADDTSFGGNLGKAVFQAKKRVLEPFGLVEEGAKTAPTGKRIDDHFPKRKKARTEEDSKPPTSSDAEAGPSGSQQLQIPAQPASSLGADTMSAGGGGPLGDNNQGADGVGNASGDWHCDSTWMGDRVVTKSTRTWVPPSYNNHQYREIKSGSVDGSNANAYFGYSTPWGYFDFNRFHSHWSPRDWQRLINNYWGFRPRSLRVKIFNIQVKEVTVQDSTTTIANNLTSTVQVFTDDDYQLPYVVGNGTEGCLPAFPPQVFTLPQYGYATLNRDNTENPTERSSFFCLEYFPSKMLRTGNNFEFTYNFEEVPFHSSFAPSQNLFKLANPLVDQYLYRFVSTNNTGGVQFNKNLAGRYANTYKNWFPGPMGRTQGWNLGSGVNRASVSAFATTNRMELEGASYQVPPQPNGMTNNLQGSNTYALENTMIFNSQPANPGTTATYLEGNMLITSESETQPVNRVAYNVGGQMATNNQSSTTAPATGTYNLQEIVPGSVWMERDVYLQGPIWAKIPETGAHFHPSPAMGGFGLKHPPPMMLIKNTPVPGNITSFSDVPVSSFITQYSTGQVAVEMEWELKKENSKRWNPEIQYTNNYNDPQFVDFAPDSTGEYRTTRPIGTRYLTRPL

SEQ ID NO: 860 - protein, 724 aa, Artificial Sequence
  Description of Artificial Sequence: Synthetic polypeptide
MSFVDHPPDWLEEVGEGLREFLGLEAGPPKPKPNQQHQDQARGLVLPGYNYLGPGNGLDRGEPVNRADEVAREHDISYNEQLEAGDNPYLKYNHADAEFQEKLADDTSFGGNLGKAVFQAKKRVLEPFGLVEEGAKTAPTGKRIDDHFPKRKKARTEEDSKPSTSSDAEAGPSGSQQLQIPAQPASSLGADTMSAGGGGPLGDNNQGADGVGNASGDWHCDSTWMGDRVVTKSTRTWVLPSYNNHQYREIKSGSVDGSNANAYFGYSTPWGYFDFNRFHSHWSPRDWQRLINNYWGFRPRSLRVKIFNIQVKEVTVQDSTTTIANNLTSTVQVFTDDDYQLPYVVGNGTEGCLPAFPPQVFTLPQYGYATLNRDNTENPTERSSFFCLEYFPSKMLRTGNNFEFTYNFEEVPFHSSFAPSQNLFKLANPLVDQYLYRFVSTNNTGGVQFNKNLAGRYANTYKNWFPGPMGRTQGWNLGSGVNRASVSAFATTNRMELEGASYQVPPQPNGMTNNLQGSNTYALENTMIFNSQPANPGTTATYLEGNMLITSESETQPVNRVAYNVGGQMATNNQSSTTAPATGTYNLQEIVPGSVWMERDVYLQGPIWAKIPETGAHFHPSPAMGGFGLKHPPPMMLIKNTPAPGNITSFSDVPVSSFITQYSTGQVTVEMEWELKKENSKRWNPEIQYTNNYNDPQFVDFAPDSTGEYRTTRPIGTRYLTRPL

SEQ ID NO: 861 - protein, 724 aa, Artificial Sequence
  Description of Artificial Sequence: Synthetic polypeptide
MSFVDHPPDWLEEVGEGLREFLGLEAGPPKPKPNQQHQDQARGLVLPGYNYLGPGNGLDRGEPVNRADEVAREHDISYNEQLEAGDNPYLKYNHADAEFQEKLADDTSFGGNLGKAVFQAKKRVLEPFGLAEEGAKTAPTGKRIDDHFPKRKKARTEEDSKPSTSSDAEAGPSGSQQLQIPAQPASSLGADTMSAGGGGPLGDNNQGADGVGNASGDWHCDSTWMGDRVVTKSTRTWVLPSYNNHQYREIKSGSVDGSNANAYFGYSTPWGYFDFNRFHSHWSPRDWQRLINNYWGFRPRSLRAKIFNIQVKEVTVQDSTTTIANNLTSTVQVFTDDDYQLPYVVGNGTEGCLPAFPPQVFTLPQYGYATLNRDNTENPTERSSFFCLEYFPSKMLRTGNNLEFTYNFEEVPFHSSFAPSQNLFKLANPLVDQYLYRFVSTNNTGGVQFNKNLAGRYANTYKNWFPGPMGRTQGWNLGSGVNRASVSAFATTNRMELEGASYQVPPQPNGMTNNLQGSNTYALENTMIFNSQPANPGTTATYLEGNMLITSESETQPVNRVVHNVGGQMATNNQSSTTAPATGTYNLQEIVPGSVWMERDVYLQGPIWAKIPETGAHFHPSPAMGGFGLKHPPPMMLIKNTPVPGNITSFSDVPVSSFITQYSTGQVTVEMEWELKKENSKRWNPEIQYTNNYNDPQFVDFAPDSTGEYRTTRPIGTRYLTRPL

SEQ ID NO: 862 - protein, 724 aa, Artificial Sequence
  Description of Artificial Sequence: Synthetic polypeptide
MSFVDHPPDWLEEVGEGLREFLGLEAGPPKPKPNQQHQDQARGLVLPGYNYLGPGNGLDRGEPVNRADEVAREHDISYNEQLEAGDNPYLKYNHADAEFQEKLADDTSFGGNLGKAVFQAKKRVLEPFGLVEEGAKTAPTGKRIDDHFPKRKKARTEEDSKPSTSSDAEAGPSGSQQLQIPAQPASSLGADTMSAGGGGPLGDNNQGADGVGNASGDWHCDSTWMGDRVVTKSTRTWVLPSYNNHQYREIKSGSVDGGNANAYFGYSTPWGYFDFNRFHSHWSPRDWQRLINNYWGFRPRSLRVKIFNIQVKEVTVQDSTTTIANNLTSTVQVFTDDDYQLPYVVGNGTEGCLPAFPPQVFTLPQYGYATLNRDNTENPTERSSFFCLEYFPSKMLRTGNNFEFTYNFEEVPFHSSFAPSQNLFKLANPLVDQYLYRFVSTNNTGGVQFNKNLAGRYANTYKNWFPGPMGRTQGWNLGSGVNRASVSAFATTNRMELEGASYQVPPQPNGMTNNLQGSNTYALENTMIFNSQPANPGTTATYLEGNMLITSESETQPVNRVAYNVGGQMATNNQSSTTAPATGTYNLQEIVPGSVWMERDVYLQGPIWAKIPETGAHFHPSPAMGGFGLKHPPPMMLIKNTPAPGNITSFSDVPVSSFITQYSTGQVTVEMEWELKKGNSKRWNPEIQYTNNYNDPQFVDFAPDSTGEYRTTRPIGTRYLTRPL

SEQ ID NO: 863 - protein, 724 aa, Artificial Sequence
  Description of Artificial Sequence: Synthetic polypeptide
MSFVDHPPDWLEEVGEGLREFLGLEAGPPKPKPNQQHQDQARGLVLPGYNYLGPGNGLDRGEPVNRADEVAREHDISYNEQLEAGDNPYLKYNHADAEFQEKLADDTSFGGNLGKAVFQAKKRVLEPFGLVEEGAKTAPTGKRIDDHFPKRKKARTEEDSKPSTSSDAEAGPSGSQQLQIPAQPASSLGADTMSAGGGGPLGDNNQGADGVGNASGDWHCDSTWMGDRVVTKSTRTWVLPSYNNHQYREIKSGSVDGSNANAYFGYSTPWGYFDFNRFHSHWSPRDWQRLINNYWGFRPRSLRVKIFNIQVKEVTVQDSTTTIANNLTSTVQVFTDDDYQLPYVVGNGTEGCLPAFPPQVFTLPQYGYATLNRDNTENPTERSSFFCLEYFPSKMLRTGNNFEFTYNFEEVPFHSSFAPSQNLFKLANPLVDQYLYRFVSTNNTGGVQFNKNLAGRYANTYKNWFPGPMGRTQGWNLGSGVNRASVSAFATTNRMELEGASYQVPPQPNGMTNNLQGSNTYALENTMIFNSQPANPGTTATYLEGNMLITSESETQPVNRVAYNVGGQMATNNQSSTTAPATGTYNLQEIVPGSVWMERDVYLQGPIWAKIPETGVHFHPSPAMGGFGLKHPPPMMLIKNTPVPGNITSFSDVPVSSFITQYSTGQVTVEMEWELKKENSKRWNPEIQYTNNYNDPQFVDFAPDSTGEYRTTRPIGTRYLTRPL

SEQ ID NO: 864 - protein, 724 aa, Artificial Sequence
  Description of Artificial Sequence: Synthetic polypeptide
  MOD_RES (551)..(551): Xaa = any amino acid
MSFVDHPPDWLEEVGEGLREFLGLEAGPPKPKPNQQHQDQARGLVLPGYNYLGPGNGLDRGEPVNRADEVAREHDISYNEQLEAGDNPYLKYNHADAEFQEKLADDTSFGGNLGKAVFQAKKRVLEPFGLVEEGAKTAPTGKRIDDHFPKRKKARTEEDSKPSTSSDAEAGPSGSQQLQIPAQPASSLGADTMSAGGGGPLGDNNQGADGVGNASGDWHCDSTWMGDRVVTKSTRTWVLPSYNNHQYREIKSGSVDGSNANAYFGYSTPWGYFDFNRFHSHWSPRDWQRLINNYWGFRPRSLRVKIFNIQVKEVTVQDSTTTIANNLTSTVQVFTDDDYQLPYVVGNGTEGCLPAFPPQVFTLPQYGYATLNRDNTENPTERSSFFCLEYFPSKMLRTGNNFEFTYNFEEVPFHSSFAPSQNLFKLANPLVDQYLYRFVSTNNTGGVQFNKNLAGRYANTYKNWFPGPMGRTQGWNLGSGVNRASVSAFATTNRMELEGASYQVPPQPNGMTNNLQGSNTYALENTMIFNSQPANPGTTATYLEGSMLITXESETQPVNRVAYNVGGQMATNNQSSTTAPATGTYNLQEIVPGSVWMERDVYLQGPIWAKIPETGAHFHPSPAMGGFGLKHPPPMMLIKNTPVPGNITSFSDVPVSSFITQYSTGQVTVEMEWELKKENSKRWNPEIQYTNNYNDPQFVDFAPDSTGEYRTTRPIGTRYLTRPL

SEQ ID NO: 865 - protein, 736 aa, Artificial Sequence; identical to SEQ ID NO: 39
  Description of Artificial Sequence: Synthetic polypeptide

SEQ ID NO: 866 - protein, 734 aa, Artificial Sequence; identical to SEQ ID NO: 57
  Description of Artificial Sequence: Synthetic polypeptide

SEQ ID NO: 867 - protein, 723 aa, Artificial Sequence
  Description of Artificial Sequence: Synthetic polypeptide
MSFVDHPPDWLEEVGEGLREFLGLEAGPPKPKPNQQHQDQARGLVLPGYNYLGPGNGLDRGEPVNRADEVAREHDISYNEQLEAGDNPYLKYNHADAEFQEKLADDTSFGGNLGKAVFQAKKRVLEPFGLVEEGAKTAPTGKRIDDHFPKRKKARTEEDSKPSTSSDAEAGPSGSQQLQIPAQPASSLGADTMSAGGGPLGDNNQGADGVGNASGDWHCDSTWMGDRVVTKSTRTWVLPSYNNHQYREIKSGSVDGSNANAYFGYSTPWGYFDFNRFHSHWSPRDWQRLINNYWGFRPRSLRVKIFNIQVKEVTVQDSTTTIANNLTSTVQVFTDDDYQLPYVVGNGTEGCLPAFPPQVFTLPQYGYATLNRDNTENPTERSSFFCLEYFPSKMLRTGNNFEFTYNFEEVPFHSSFAPSQNLFKLANPLVDQYLYRFVSTNNTGGVQFNKNLAGRYANTYKNWFPGPMGRTQGWNLGSGVNRASVSAFATTNRMELEGASYQVPPQPNGMTNNLQGSNTYALENTMIFNSQPANPGTTATYLEGNMLITSESETQPVNRVAYNVGGQMATNNQSSTTAPATGTYNLQEIVPGSVWMERDVYLQGPIWAKIPETGAHFHPSPAMGGFGLKHPPPMMLIKNTPVPGNITSFSDVPVSSFITQYSTGQVTVEMEWELKKENSKRWNPEIQYTNNYNDPQFVDFAPDSTGEYRTTRPIGTRYLTRPL

SEQ ID NO: 868 - protein, 743 aa, Artificial Sequence
  Description of Artificial Sequence: Synthetic polypeptide
MAADGYLPDWLEDNLSEGIREWWALKPGAPQPKANQQHQDNARGLVLPGYKYLGPGNGLDKGEPVNAADAAALEHDKAYDQQLKAGDNPYLKYNHADAEFQERLKEDTSFGGNLGRAVFQAKKRLLEPLGLVEEAAKTAPGKKRPVEQSPQEPDSSAGIGKSGAQPAKKRLNFGQTGDTESVPDPQPIGEPPAAPSGVGSLTMASGGGAPVADNNEGADGVGSSSGNWHCDSQWLGDRVITTSTRTWALPTYNNHLYKQISNSTSGGSSNDNAYFGYSTPWGYFDFNRFHCHFSPRDWQRLINNNWGFRPKRLNFKLFNIQVKEVTDNNGVKTIANNLTSTVQVFTDSDYQLPYVLGSAHEGCLPPFPADVFMIPQYGYLTLNDGSQAVGRSSFYCLEYFPSQMLRTGNNFQFSYEFENVPFHSSYAHSQSLDRLMNPLIDQYLYYLSRTINGSGQNQQTLKFSVAGPSNMAVQGRNYIPGPSYRQQRVSTTVTQNNNSEFAWPGASSWALNGRNSLMNPGPAMASHKEGEDRFFPLSGSLIFGKQGTGRDNVDADKVMITNEEEIKTTNPVATESYGQVATNHQSAQTLAVPFKAQAQTGWVQNQGILPGMVWQDRDVYLQGPIWAKIPHTDGNFHPSPLMGGFGMKHPPPQILIKNTPVPADPPTAFNKDKLNSFITQYSTGQVSVEIEWELQKENSKRWNPEIQYTSNYYKSNNVEFAVNTEGVYSEPRPIGTRYLTRNL

SEQ ID NO: 869 - DNA, 2232 bp, Artificial Sequence
  Description of Artificial Sequence: Synthetic polynucleotide
atggctgccgatggttatcttccagattggctcgaggacaaccttagtgaaggaattcgcgagtggtgggctttgaaacctggagcccctcaacccaaggcaaatcaacaacatcaagacaacgctcgaggtcttgtgcttccgggttacaaataccttggacccggcaacggactcgacaagggggagccggtcaacgcagcagacgcggcggccctcgagcacgacaaggcctacgaccagcagctcaaggccggagacaacccgtacctcaagtacaaccacgccgacgccgagttccaggagcggctcaaagaagatacgtcttttgggggcaacctcgggcgagcagtcttccaggccaaaaagaggcttcttgaacctcttggtctggttgaggaagcggctaagacggctcctggaaagaagaggcctgtagagcagtctcctcaggaaccggactcctccgcgggtattggcaaatcgggtgcacagcccgctaaaaagagactcaatttcggtcagactggcgacacagagtcagtcccagaccctcaaccaatcggagaacctcccgcagccccctcaggtgtgggatctcttacaatggcttcaggtggtggcgcaccagtggcagacaataacgaaggtgccgatggagtgggtagttcctcgggaaattggcattgcgattcccaatggctgggggacagagtcatcaccaccagcacccgaacctgggccctgcccacctacaacaatcacctctacaagcaaatctccaacagcacatctggaggatcttcaaatgacaacgcctacttcggctacagcaccccctgggggtattttgacttcaacagattccactgccacttctcaccacgtgactggcagcgactcatcaacaacaactggggattccggcctaagcgactcaacttcaagctcttcaacattcaggtcaaagaggttacggacaacaatggagtcaagaccatcgccaataaccttaccagcacggtccaggtcttcacggactcagactatcagctcccgtacgtgctcgggtcggctcacgagggctgcctcccgccgttcccagcggacgttttcatgattcctcagtacgggtatctgacgcttaatgatggaagccaggccgtgggtcgttcgtccttttactgcctggaatatttcccgtcgcaaatgctaagaacgggtaacaacttccagttcagctacgagtttgagaacgtacctttccatagcagctacgctcacagccaaagcctggaccgactaatgaatccactcatcgaccaatacttgtactatctctctagaactattaacggttctggacagaatcaacaaacgctaaaattcagtgtggccggacccagcaacatggctgtccagggaagaaactacatacctggacccagctaccgacaacaacgtgtctcaaccactgtgactcaaaacaacaacagcgaatttgcttggcctggagcttcttcttgggctctcaatggacgtaatagcttgatgaatcctggacctgctatggccagccacaaagaaggagaggaccgtttctttcctttgtctggatctttaatttttggcaaacaaggtaccggcagagacaacgtggatgcggacaaagtcatgataaccaacgaagaagaaattaaaactactaacccggtagcaacggagtcctatggacaagtggccacaaaccaccagagtgcccaaactttggcggtgccttttaaggcacaggcgcagaccggttgggttcaaaaccaaggaatacttccgggtatggtttggcaggacagagatgtgtacctgcaaggacccatttgggccaaaattcctcacacggacggcaactttcacccttctccgctgatgggagggtttggaatgaagcacccgcctcctcagatcctcatcaaaaacacacctgtacctgcggatcctccaacggccttcaacaaggacaagctgaactctttcatcacccagtattctactggccaagtcagcgtggagatcgagtgggagctgcagaaggaaaacagcaagcgctggaacccggagatccagtacacttccaactattacaagtctaataatgttgaatttgctgttaatactgaaggtgtatatagtgaaccccgccccattggcaccagatacctgactcgtaatctgtaa

SEQ ID NO: 870 - protein, 736 aa, Artificial Sequence
  Description of Artificial Sequence: Synthetic polypeptide
MAADGYLPDWLEDNLSEGIREWWALKPGAPQPKANQQHQDNARGLVLPGYKYLGPGNGLDKGEPVNAADAAALEHDKAYDQQLKAGDNPYLKYNHADAEFQERLKEDTSFGGNLGRAVFQAKKRLLEPLGLVEEAAKTAPGKKRPVEQSPQEPDSSAGIGKSGAQPAKKRLNFGQTGDTESVPDPQPIGEPPAAPSGVGSLTMASGGGAPVADNNEGADGVGSSSGNWHCDSQWLGDRVITTSTRTWALPTYNNHLYKQISNSTSGGSSNDNAYFGYSTPWGYFDFNRFHCHFSPRDWQRLINNNWGFRPKRLNFKLFNIQVKEVTDNNGVKTIANNLTSTVQVFTDSDYQLPYVLGSAHEGCLPPFPADVFMIPQYGYLTLNDGSQAVGRSSFYCLEYFPSQMLRTGNNFQFSYEFENVPFHSSYAHSQSLDRLMNPLIDQYLYYLSRTIQSSQTPRQTLKFSVAGPSNMAVQGRNYIPGPSYRQQRVSTTVTQNNNSEFAWPGASSWALNGRNSLMNPGPAMASHKEGEDRFFPLSGSLIFGKQGTGRDNVDADKVMITNEEEIKTTNPVATESYGQVATNHQSAQAQAQTGWVQNQGILPGMVWQDRDVYLQGPIWAKIPHTDGNFHPSPLMGGFGMKHPPPQILIKNTPVPADPPTAFNKDKLNSFITQYSTGQVSVEIEWELQKENSKRWNPEIQYTSNYYKSNNVEFAVNTEGVYSEPRPIGTRYLTRNL

SEQ ID NO: 871 - protein, 743 aa, Artificial Sequence
  Description of Artificial Sequence: Synthetic polypeptide
MAADGYLPDWLEDNLSEGIREWWALKPGAPQPKANQQHQDNARGLVLPGYKYLGPGNGLDKGEPVNAADAAALEHDKAYDQQLKAGDNPYLKYNHADAEFQERLKEDTSFGGNLGRAVFQAKKRLLEPLGLVEEAAKTAPGKKRPVEQSPQEPDSSAGIGKSGAQPAKKRLNFGQTGDTESVPDPQPIGEPPAAPSGVGSLTMASGGGAPVADNNEGADGVGSSSGNWHCDSQWLGDRVITTSTRTWALPTYNNHLYKQISNSTSGGSSNDNAYFGYSTPWGYFDFNRFHCHFSPRDWQRLINNNWGFRPKRLNFKLFNIQVKEVTDNNGVKTIANNLTSTVQVFTDSDYQLPYVLGSAHEGCLPPFPADVFMIPQYGYLTLNDGSQAVGRSSFYCLEYFPSQMLRTGNNFQFSYEFENVPFHSSYAHSQSLDRLMNPLIDQYLYYLSRTIILGTGTSQTLKFSVAGPSNMAVQGRNYIPGPSYRQQRVSTTVTQNNNSEFAWPGASSWALNGRNSLMNPGPAMASHKEGEDRFFPLSGSLIFGKQGTGRDNVDADKVMITNEEEIKTTNPVATESYGQVATNHQSAQTRTNPEAAQAQTGWVQNQGILPGMVWQDRDVYLQGPIWAKIPHTDGNFHPSPLMGGFGMKHPPPQILIKNTPVPADPPTAFNKDKLNSFITQYSTGQVSVEIEWELQKENSKRWNPEIQYTSNYYKSNNVEFAVNTEGVYSEPRPIGTRYLTRNL

SEQ ID NO: 872 - protein, 743 aa, Artificial Sequence
  Description of Artificial Sequence: Synthetic polypeptide
MAADGYLPDWLEDNLSEGIREWWALKPGAPQPKANQQHQDNARGLVLPGYKYLGPGNGLDKGEPVNAADAAALEHDKAYDQQLKAGDNPYLKYNHADAEFQERLKEDTSFGGNLGRAVFQAKKRLLEPLGLVEEAAKTAPGKKRPVEQSPQEPDSSAGIGKSGAQPAKKRLNFGQTGDTESVPDPQPIGEPPAAPSGVGSLTMASGGGAPVADNNEGADGVGSSSGNWHCDSQWLGDRVITTSTRTWALPTYNNHLYKQISNSTSGGSSNDNAYFGYSTPWGYFDFNRFHCHFSPRDWQRLINNNWGFRPKRLNFKLFNIQVKEVTDNNGVKTIANNLTSTVQVFTDSDYQLPYVLGSAHEGCLPPFPADVFMIPQYGYLTLNDGSQAVGRSSFYCLEYFPSQMLRTGNNFQFSYEFENVPFHSSYAHSQSLDRLMNPLIDQYLYYLSRTIILGTGTSQTLKFSVAGPSNMAVQGRNYIPGPSYRQQRVSTTVTQNNNSEFAWPGASSWALNGRNSLMNPGPAMASHKEGEDRFFPLSGSLIFGKQGTGRDNVDADKVMITNEEEIKTTNPVATESYGQVATNHQSAQNGGTSSSAQAQTGWVQNQGILPGMVWQDRDVYLQGPIWAKIPHTDGNFHPSPLMGGFGMKHPPPQILIKNTPVPADPPTAFNKDKLNSFITQYSTGQVSVEIEWELQKENSKRWNPEIQYTSNYYKSNNVEFAVNTEGVYSEPRPIGTRYLTRNL

SEQ ID NO: 873 - protein, 7 aa, Artificial Sequence
  Description of Artificial Sequence: Synthetic polypeptide
TLAVPFK

SEQ ID NO: 874 - protein, 7 aa, Artificial Sequence
  Description of Artificial Sequence: Synthetic polypeptide
KFPVALT

SEQ ID NO: 875 - protein, 6 aa, Artificial Sequence
  Description of Artificial Sequence: Synthetic polypeptide
LAVPFK

SEQ ID NO: 876 - protein, 5 aa, Artificial Sequence
  Description of Artificial Sequence: Synthetic polypeptide
AVPFK

SEQ ID NO: 877 - protein, 4 aa, Artificial Sequence
  Description of Artificial Sequence: Synthetic polypeptide
VPFK

SEQ ID NO: 878 - protein, 6 aa, Artificial Sequence
  Description of Artificial Sequence: Synthetic polypeptide
TLAVPF

SEQ ID NO: 879 - protein, 5 aa, Artificial Sequence
  Description of Artificial Sequence: Synthetic polypeptide
TLAVP

SEQ ID NO: 880 - protein, 4 aa, Artificial Sequence
  Description of Artificial Sequence: Synthetic polypeptide
TLAV

SEQ ID NO: 881 - protein, 7 aa, Artificial Sequence
  Description of Artificial Sequence: Synthetic polypeptide
SVSKPFL

SEQ ID NO: 882 - protein, 7 aa, Artificial Sequence
  Description of Artificial Sequence: Synthetic polypeptide
FTLTTPK

SEQ ID NO: 883 - protein, 7 aa, Artificial Sequence
  Description of Artificial Sequence: Synthetic polypeptide
MNATKNV

SEQ ID NO: 884 - protein, 7 aa, Artificial Sequence
  Description of Artificial Sequence: Synthetic polypeptide
QSSQTPR

SEQ ID NO: 885 - protein, 7 aa, Artificial Sequence
  Description of Artificial Sequence: Synthetic polypeptide
ILGTGTS

SEQ ID NO: 886 - protein, 7 aa, Artificial Sequence
  Description of Artificial Sequence: Synthetic polypeptide
TRTNPEA

SEQ ID NO: 887 - protein, 7 aa, Artificial Sequence
  Description of Artificial Sequence: Synthetic polypeptide
NGGTSSS

SEQ ID NO: 888 - protein, 7 aa, Artificial Sequence
  Description of Artificial Sequence: Synthetic polypeptide
YTLSQGW

SEQ ID NO: 889 - DNA, 21 bp, Artificial Sequence
  Description of Artificial Sequence: Synthetic polynucleotide
aagtttcctgtggcgttgact

SEQ ID NO: 890 - DNA, 21 bp, Artificial Sequence
  Description of Artificial Sequence: Synthetic polynucleotide
actttggcggtgccttttaag

SEQ ID NO: 891 - DNA, 21 bp, Artificial Sequence
  Description of Artificial Sequence: Synthetic polynucleotide
agtgtgagtaagccttttttg

SEQ ID NO: 892 - DNA, 21 bp, Artificial Sequence
  Description of Artificial Sequence: Synthetic polynucleotide
tttacgttgacgacgcctaag

SEQ ID NO: 893 - DNA, 21 bp, Artificial Sequence
  Description of Artificial Sequence: Synthetic polynucleotide
atgaatgctacgaagaatgtg

SEQ ID NO: 894 - DNA, 21 bp, Artificial Sequence
  Description of Artificial Sequence: Synthetic polynucleotide
cagtcgtcgcagacgcctagg

SEQ ID NO: 895 - DNA, 21 bp, Artificial Sequence
  Description of Artificial Sequence: Synthetic polynucleotide
attctggggactggtacttcg

SEQ ID NO: 896 - DNA, 21 bp, Artificial Sequence
  Description of Artificial Sequence: Synthetic polynucleotide
acgcggactaatcctgaggct

SEQ ID NO: 897 - DNA, 21 bp, Artificial Sequence
  Description of Artificial Sequence: Synthetic polynucleotide
aatggggggactagtagttct

SEQ ID NO: 898 - DNA, 21 bp, Artificial Sequence
  Description of Artificial Sequence: Synthetic polynucleotide
tatactttgtcgcagggttgg

SEQ ID NO: 899 - protein, 9 aa, Artificial Sequence
  Description of Artificial Sequence: Synthetic polypeptide
SADNNNSEY

SEQ ID NO: 900 - protein, 9 aa, Artificial Sequence
  Description of Artificial Sequence: Synthetic polypeptide
LIDQYLYYL

SEQ ID NO: 901 - protein, 9 aa, Artificial Sequence
  Description of Artificial Sequence: Synthetic polypeptide
VPQYGYLTL

SEQ ID NO: 902 - protein, 9 aa, Artificial Sequence
  Description of Artificial Sequence: Synthetic polypeptide
TTSTRTWAL

SEQ ID NO: 903 - protein, 9 aa, Artificial Sequence
  Description of Artificial Sequence: Synthetic polypeptide
YHLNGRDSL

SEQ ID NO: 904 - protein, 9 aa, Artificial Sequence
  Description of Artificial Sequence: Synthetic polypeptide
SQAVGRSSF

SEQ ID NO: 905 - protein, 9 aa, Artificial Sequence
  Description of Artificial Sequence: Synthetic polypeptide
VPANPSTTF

SEQ ID NO: 906 - protein, 9 aa, Artificial Sequence
  Description of Artificial Sequence: Synthetic polypeptide
FPQSGVLIF

SEQ ID NO: 907 - protein, 15 aa, Artificial Sequence
  Description of Artificial Sequence: Synthetic polypeptide
YFDFNRFHCHFSPRD

SEQ ID NO: 908 - protein, 15 aa, Artificial Sequence
  Description of Artificial Sequence: Synthetic polypeptide
VGNSSGNWHCDSTWM

SEQ ID NO: 909 - protein, 15 aa, Artificial Sequence
  Description of Artificial Sequence: Synthetic polypeptide
QFSQAGASDIRDQSR

SEQ ID NO: 910 - protein, 13 aa, Artificial Sequence
  Description of Artificial Sequence: Synthetic polypeptide
GASDIRQSRNWLP

SEQ ID NO: 911 - protein, 15 aa, Artificial Sequence
  Description of Artificial Sequence: Synthetic polypeptide
GNRQAATADVNTQGV

SEQ ID NO: 912 - protein, 9 aa, Artificial Sequence
  Description of Artificial Sequence: Synthetic polypeptide
LDRLMNPLI

SEQ ID NO: 913 - protein, 9 aa, Artificial Sequence
  Description of Artificial Sequence: Synthetic polypeptide
QPAKKRLNF

SEQ ID NO: 914 - protein, 7 aa, Artificial Sequence
  Description of Artificial Sequence: Synthetic polypeptide
QAVRTSL

SEQ ID NO: 915 - protein, 7 aa, Artificial Sequence
  Description of Artificial Sequence: Synthetic polypeptide
LAKERLS

SEQ ID NO: 916 - RNA, 21 nt, Artificial Sequence
  Description of Artificial Sequence: Synthetic oligonucleotide
  misc_feature (20)..(21): nn is a deoxythymidine dinucleotide
uuuauaggccagaccuccgnn

SEQ ID NO: 917 - RNA, 21 nt, Artificial Sequence
  Description of Artificial Sequence: Synthetic oligonucleotide
  misc_feature (20)..(21): nn is a deoxythymidine dinucleotide
uuuuauaggccagaccuccnn

SEQ ID NO: 918 - RNA, 21 nt, Artificial Sequence
  Description of Artificial Sequence: Synthetic oligonucleotide
  misc_feature (20)..(21): nn is a deoxythymidine dinucleotide
ucuuuauaggccagaccucnn

SEQ ID NO: 919 - RNA, 21 nt, Artificial Sequence
  Description of Artificial Sequence: Synthetic oligonucleotide
  misc_feature (20)..(21): nn is a deoxythymidine dinucleotide
uacuuuauaggccagaccunn

SEQ ID NO: 920 - RNA, 21 nt, Artificial Sequence
  Description of Artificial Sequence: Synthetic oligonucleotide
  misc_feature (20)..(21): nn is a deoxythymidine dinucleotide
uuacuuuauaggccagaccnn

SEQ ID NO: 921 - RNA, 21 nt, Artificial Sequence
  Description of Artificial Sequence: Synthetic oligonucleotide
  misc_feature (20)..(21): nn is a deoxythymidine dinucleotide
uacuacuuuauaggccagann

SEQ ID NO: 922 - RNA, 21 nt, Artificial Sequence
  Description of Artificial Sequence: Synthetic oligonucleotide
  misc_feature (20)..(21): nn is a deoxythymidine dinucleotide
ugacuacuuuauaggccagnn

SEQ ID NO: 923 - RNA, 21 nt, Artificial Sequence
  Description of Artificial Sequence: Synthetic oligonucleotide
  misc_feature (20)..(21): nn is a deoxythymidine dinucleotide
ucgacuacuuuauaggccann

SEQ ID NO: 924 - RNA, 21 nt, Artificial Sequence
  Description of Artificial Sequence: Synthetic oligonucleotide
  misc_feature (20)..(21): nn is a deoxythymidine dinucleotide
ugcgacuacuuuauaggccnn

SEQ ID NO: 925 - RNA, 21 nt, Artificial Sequence
  Description of Artificial Sequence: Synthetic oligonucleotide
  misc_feature (20)..(21): nn is a deoxythymidine dinucleotide
ucgcgacuacuuuauaggcnn

SEQ ID NO: 926 - RNA, 21 nt, Artificial Sequence
  Description of Artificial Sequence: Synthetic oligonucleotide
  misc_feature (20)..(21): nn is a deoxythymidine dinucleotide
uccgcgacuacuuuauaggnn

SEQ ID NO: 927 - RNA, 21 nt, Artificial Sequence
  Description of Artificial Sequence: Synthetic oligonucleotide
  misc_feature (20)..(21): nn is a deoxythymidine dinucleotide
ugcugcaggagacuacgacnn

SEQ ID NO: 928 - RNA, 21 nt, Artificial Sequence
  Description of Artificial Sequence: Synthetic oligonucleotide
  misc_feature (20)..(21): nn is a deoxythymidine dinucleotide
uacgcugcaggagacuacgnn

SEQ ID NO: 929 - RNA, 21 nt, Artificial Sequence
  Description of Artificial Sequence: Synthetic oligonucleotide
  misc_feature (20)..(21): nn is a deoxythymidine dinucleotide
ugacgcugcaggagacuacnn

SEQ ID NO: 930 - RNA, 21 nt, Artificial Sequence
  Description of Artificial Sequence: Synthetic oligonucleotide
  misc_feature (20)..(21): nn is a deoxythymidine dinucleotide
uagacgcugcaggagacuann

SEQ ID NO: 931 - RNA, 21 nt, Artificial Sequence
  Description of Artificial Sequence: Synthetic oligonucleotide
  misc_feature (20)..(21): nn is a deoxythymidine dinucleotide
ucacggccuucgucgccaunn

SEQ ID NO: 932 - RNA, 21 nt, Artificial Sequence
  Description of Artificial Sequence: Synthetic oligonucleotide
  misc_feature (20)..(21): nn is a deoxythymidine dinucleotide
ucgcacacggccuucgucgnn

SEQ ID NO: 933 - RNA, 21 nt, Artificial Sequence
  Description of Artificial Sequence: Synthetic oligonucleotide
  misc_feature (20)..(21): nn is a deoxythymidine dinucleotide
uagcacgcacacggccuucnn

SEQ ID NO: 934 - RNA, 21 nt, Artificial Sequence
  Description of Artificial Sequence: Synthetic oligonucleotide
  misc_feature (20)..(21): nn is a deoxythymidine dinucleotide
uuucagcacgcacacggccnn

SEQ ID NO: 935 - RNA, 21 nt, Artificial Sequence
  Description of Artificial Sequence: Synthetic oligonucleotide
  misc_feature (20)..(21): nn is a deoxythymidine dinucleotide
ugcacugggccgucgcccunn

SEQ ID NO: 936 - RNA, 21 nt, Artificial Sequence
  Description of Artificial Sequence: Synthetic oligonucleotide
  misc_feature (20)..(21): nn is a deoxythymidine dinucleotide
uaauugaugaugcccugcann

SEQ ID NO: 937 - RNA, 21 nt, Artificial Sequence
  Description of Artificial Sequence: Synthetic oligonucleotide
  misc_feature (20)..(21): nn is a deoxythymidine dinucleotide
uaaauugaugaugcccugcnn

SEQ ID NO: 938 - RNA, 21 nt, Artificial Sequence
  Description of Artificial Sequence: Synthetic oligonucleotide
  misc_feature (20)..(21): nn is a deoxythymidine dinucleotide
ucgaaauugaugaugcccunn

SEQ ID NO: 939 - RNA, 21 nt, Artificial Sequence
  Description of Artificial Sequence: Synthetic oligonucleotide
  misc_feature (20)..(21): nn is a deoxythymidine dinucleotide
uucgaaauugaugaugcccnn

SEQ ID NO: 940 - RNA, 21 nt, Artificial Sequence
  Description of Artificial Sequence: Synthetic oligonucleotide
  misc_feature (20)..(21): nn is a deoxythymidine dinucleotide
ucucgaaauugaugaugccnn

SEQ ID NO: 941 - RNA, 21 nt, Artificial Sequence
  Description of Artificial Sequence: Synthetic oligonucleotide
  misc_feature (20)..(21): nn is a deoxythymidine dinucleotide
ugcucgaaauugaugaugcnn

SEQ ID NO: 942 - RNA, 21 nt, Artificial Sequence
  Description of Artificial Sequence: Synthetic oligonucleotide
  misc_feature (20)..(21): nn is a deoxythymidine dinucleotide
uugcucgaaauugaugaugnn

SEQ ID NO: 943 - RNA, 21 nt, Artificial Sequence
  Description of Artificial Sequence: Synthetic oligonucleotide
  misc_feature (20)..(21): nn is a deoxythymidine dinucleotide
uuuccuucugcucgaaauunn

SEQ ID NO: 944 - RNA, 21 nt, Artificial Sequence
  Description of Artificial Sequence: Synthetic oligonucleotide
  misc_feature (20)..(21): nn is a deoxythymidine dinucleotide
uacuuuccuucugcucgaann

SEQ ID NO: 945 - RNA, 21 nt, Artificial Sequence
  Description of Artificial Sequence: Synthetic oligonucleotide
  misc_feature (20)..(21): nn is a deoxythymidine dinucleotide
uuacuuuccuucugcucgann

SEQ ID NO: 946 - RNA, 21 nt, Artificial Sequence
  Description of Artificial Sequence: Synthetic oligonucleotide
  misc_feature (20)..(21): nn is a deoxythymidine dinucleotide
uaaugcuuccccacaccuunn

SEQ ID NO: 947 - RNA, 21 nt, Artificial Sequence
  Description of Artificial Sequence: Synthetic oligonucleotide
  misc_feature (20)..(21): nn is a deoxythymidine dinucleotide
uuuaaugcuuccccacaccnn

SEQ ID NO: 948 - RNA, 21 nt, Artificial Sequence
  Description of Artificial Sequence: Synthetic oligonucleotide
  misc_feature (20)..(21): nn is a deoxythymidine dinucleotide
ugcaggccuucagucagucnn

SEQ ID NO: 949 - RNA, 21 nt, Artificial Sequence
  Description of Artificial Sequence: Synthetic oligonucleotide
  misc_feature (20)..(21): nn is a deoxythymidine dinucleotide
uaugcaggccuucagucagnn

SEQ ID NO: 950 - RNA, 21 nt, Artificial Sequence
  Description of Artificial Sequence: Synthetic oligonucleotide
  misc_feature (20)..(21): nn is a deoxythymidine dinucleotide
ucaugcaggccuucagucann

SEQ ID NO: 951 - RNA, 21 nt, Artificial Sequence
  Description of Artificial Sequence: Synthetic oligonucleotide
  misc_feature (20)..(21): nn is a deoxythymidine dinucleotide
uaauccaugcaggccuucann

SEQ ID NO: 952 - RNA, 21 nt, Artificial Sequence
  Description of Artificial Sequence: Synthetic oligonucleotide
  misc_feature (20)..(21): nn is a deoxythymidine dinucleotide
ugaauccaugcaggccuucnn

SEQ ID NO: 953 - RNA, 21 nt, Artificial Sequence
  Description of Artificial Sequence: Synthetic oligonucleotide
  misc_feature (20)..(21): nn is a deoxythymidine dinucleotide
ugaacauggaauccaugcann

SEQ ID NO: 954 - RNA, 21 nt, Artificial Sequence
  Description of Artificial Sequence: Synthetic oligonucleotide
  misc_feature (20)..(21): nn is a deoxythymidine dinucleotide
uaugaacauggaauccaugnn

SEQ ID NO: 955 - RNA, 21 nt, Artificial Sequence
  Description of Artificial Sequence: Synthetic oligonucleotide
  misc_feature (20)..(21): nn is a deoxythymidine dinucleotide
ucucaugaacauggaauccnn

SEQ ID NO: 956 - RNA, 21 nt, Artificial Sequence
  Description of Artificial Sequence: Synthetic oligonucleotide
  misc_feature (20)..(21): nn is a deoxythymidine dinucleotide
uaaacucaugaacauggaann

SEQ ID NO: 957 - RNA, 21 nt, Artificial Sequence
  Description of Artificial Sequence: Synthetic oligonucleotide
  misc_feature (20)..(21): nn is a deoxythymidine dinucleotide
uaucuccaaacucaugaacnn

SEQ ID NO: 958 - RNA, 21 nt, Artificial Sequence
  Description of Artificial Sequence: Synthetic oligonucleotide
  misc_feature (20)..(21): nn is a deoxythymidine dinucleotide
uuaucuccaaacucaugaann

SEQ ID NO: 959 - RNA, 21 nt, Artificial Sequence
  Description of Artificial Sequence: Synthetic oligonucleotide
  misc_feature (20)..(21): nn is a deoxythymidine dinucleotide
uguauuaucuccaaacucann

SEQ ID NO: 960 - RNA, 21 nt, Artificial Sequence
  Description of Artificial Sequence: Synthetic oligonucleotide
  misc_feature (20)..(21): nn is a deoxythymidine dinucleotide
uuguauuaucuccaaacucnn

SEQ ID NO: 961 - RNA, 21 nt, Artificial Sequence
  Description of Artificial Sequence: Synthetic oligonucleotide
  misc_feature (20)..(21): nn is a deoxythymidine dinucleotide
uccugcacugguacagccunn

SEQ ID NO: 962 - RNA, 21 nt, Artificial Sequence
  Description of Artificial Sequence: Synthetic oligonucleotide
  misc_feature (20)..(21): nn is a deoxythymidine dinucleotide
uaccugcacugguacagccnn

SEQ ID NO: 963 - RNA, 21 nt, Artificial Sequence
  Description of Artificial Sequence: Synthetic oligonucleotide
  misc_feature (20)..(21): nn is a deoxythymidine dinucleotide
uauuaaagugaggaccugcnn

SEQ ID NO: 964 - RNA, 21 nt, Artificial Sequence
  Description of Artificial Sequence: Synthetic oligonucleotide
  misc_feature (20)..(21): nn is a deoxythymidine dinucleotide
ugauuaaagugaggaccugnn

SEQ ID NO: 965 - RNA, 21 nt, Artificial Sequence
  Description of Artificial Sequence: Synthetic oligonucleotide
  misc_feature (20)..(21): nn is a deoxythymidine dinucleotide
ugauagaggauuaaagugann

SEQ ID NO: 966 - RNA, 21 nt, Artificial Sequence
  Description of Artificial Sequence: Synthetic oligonucleotide
  misc_feature (20)..(21): nn is a deoxythymidine dinucleotide
uaccguguuuucuggauagnn

SEQ ID NO: 967 - RNA, 21 nt, Artificial Sequence
  Description of Artificial Sequence: Synthetic oligonucleotide
  misc_feature (20)..(21): nn is a deoxythymidine dinucleotide
ucaccguguuuucuggauann

SEQ ID NO: 968 - RNA, 21 nt, Artificial Sequence
  Description of Artificial Sequence: Synthetic oligonucleotide
  misc_feature (20)..(21): nn is a deoxythymidine dinucleotide
uccaccguguuuucuggaunn

SEQ ID NO: 969 - RNA, 21 nt, Artificial Sequence
  Description of Artificial Sequence: Synthetic oligonucleotide
  misc_feature (20)..(21): nn is a deoxythymidine dinucleotide
ugcccaccguguuuucuggnn

SEQ ID NO: 970 - RNA, 21 nt, Artificial Sequence
  Description of Artificial Sequence: Synthetic oligonucleotide
  misc_feature (20)..(21): nn is a deoxythymidine dinucleotide
uuuggcccaccguguuuucnn

SEQ ID NO: 971 - RNA, 21 nt, Artificial Sequence
  Description of Artificial Sequence: Synthetic oligonucleotide
  misc_feature (20)..(21): nn is a deoxythymidine dinucleotide
uuuuggcccaccguguuuunn

SEQ ID NO: 972 - RNA, 21 nt, Artificial Sequence
  Description of Artificial Sequence: Synthetic oligonucleotide
  misc_feature (20)..(21): nn is a deoxythymidine dinucleotide
uucauccuuuggcccaccgnn

SEQ ID NO: 973 - RNA, 21 nt, Artificial Sequence
  Description of Artificial Sequence: Synthetic oligonucleotide
  misc_feature (20)..(21): nn is a deoxythymidine dinucleotide
ucaugccucucuucauccunn

SEQ ID NO: 974 - RNA, 21 nt, Artificial Sequence
  Description of Artificial Sequence: Synthetic oligonucleotide
  misc_feature (20)..(21): nn is a deoxythymidine dinucleotide
ucaacaugccucucuucaunn

SEQ ID NO: 975 - RNA, 21 nt, Artificial Sequence
  Description of Artificial Sequence: Synthetic oligonucleotide
  misc_feature (20)..(21): nn is a deoxythymidine dinucleotide
ugucuccaacaugccucucnn

SEQ ID NO: 976 - RNA, 21 nt, Artificial Sequence
  Description of Artificial Sequence: Synthetic oligonucleotide
  misc_feature (20)..(21): nn is a deoxythymidine dinucleotide
uagucuccaacaugccucunn

SEQ ID NO: 977 - RNA, 21 nt, Artificial Sequence
  Description of Artificial Sequence: Synthetic oligonucleotide
  misc_feature (20)..(21): nn is a deoxythymidine dinucleotide
uugcccaagucuccaacaunn

SEQ ID NO: 978 - RNA, 21 nt, Artificial Sequence
  Description of Artificial Sequence: Synthetic oligonucleotide
  misc_feature (20)..(21): nn is a deoxythymidine dinucleotide
uauugcccaagucuccaacnn

SEQ ID NO: 979 - RNA, 21 nt, Artificial Sequence
  Description of Artificial Sequence: Synthetic oligonucleotide
  misc_feature (20)..(21): nn is a deoxythymidine dinucleotide
ucacauugcccaagucuccnn

SEQ ID NO: 980 - RNA, 21 nt, Artificial Sequence
  Description of Artificial Sequence: Synthetic oligonucleotide
  misc_feature (20)..(21): nn is a deoxythymidine dinucleotide
ugucagcagucacauugccnn

SEQ ID NO: 981 - RNA, 21 nt, Artificial Sequence
  Description of Artificial Sequence: Synthetic oligonucleotide
  misc_feature (20)..(21): nn is a deoxythymidine dinucleotide
uuugucagcagucacauugnn

SEQ ID NO: 982 - RNA, 21 nt, Artificial Sequence
  Description of Artificial Sequence: Synthetic oligonucleotide
  misc_feature (20)..(21): nn is a deoxythymidine dinucleotide
uccacaccaucuuugucagnn

SEQ ID NO: 983 - RNA, 21 nt, Artificial Sequence
  Description of Artificial Sequence: Synthetic oligonucleotide
  misc_feature (20)..(21): nn is a deoxythymidine dinucleotide
ugccacaccaucuuugucann

SEQ ID NO: 984 - RNA, 21 nt, Artificial Sequence
  Description of Artificial Sequence: Synthetic oligonucleotide
  misc_feature (20)..(21): nn is a deoxythymidine dinucleotide
uaugcaauggucuccugagnn

SEQ ID NO: 985 - RNA, 21 nt, Artificial Sequence
  Description of Artificial Sequence: Synthetic oligonucleotide
  misc_feature (20)..(21): nn is a deoxythymidine dinucleotide
ugaugcaauggucuccugann

SEQ ID NO: 986 - RNA, 21 nt, Artificial Sequence
  Description of Artificial Sequence: Synthetic oligonucleotide
  misc_feature (20)..(21): nn is a deoxythymidine dinucleotide
uccaaugaugcaauggucunn

SEQ ID NO: 987 - RNA, 21 nt, Artificial Sequence
  Description of Artificial Sequence: Synthetic oligonucleotide
  misc_feature (20)..(21): nn is a deoxythymidine dinucleotide
ugccaaugaugcaauggucnn

SEQ ID NO: 988 - RNA, 21 nt, Artificial Sequence
  Description of Artificial Sequence: Synthetic oligonucleotide
  misc_feature (20)..(21): nn is a deoxythymidine dinucleotide
uugcggccaaugaugcaaunn

SEQ ID NO: 989 - RNA, 21 nt, Artificial Sequence
  Description of Artificial Sequence: Synthetic oligonucleotide
  misc_feature (20)..(21): nn is a deoxythymidine dinucleotide
uaccagugugcggccaaugnn

SEQ ID NO: 990 - RNA, 21 nt, Artificial Sequence
  Description of Artificial Sequence: Synthetic oligonucleotide
  misc_feature (20)..(21): nn is a deoxythymidine dinucleotide
uauggaccaccagugugcgnn

SEQ ID NO: 991 - RNA, 21 nt, Artificial Sequence
  Description of Artificial Sequence: Synthetic oligonucleotide
  misc_feature (20)..(21): nn is a deoxythymidine dinucleotide
uucauggaccaccagugugnn

SEQ ID NO: 992 - RNA, 21 nt, Artificial Sequence
  Description of Artificial Sequence: Synthetic oligonucleotide
  misc_feature (20)..(21): nn is a deoxythymidine dinucleotide
uuucauggaccaccagugunn

SEQ ID NO: 993 - RNA, 21 nt, Artificial Sequence
  Description of Artificial Sequence: Synthetic oligonucleotide
  misc_feature (20)..(21): nn is a deoxythymidine dinucleotide
ucuuuuucauggaccaccann

SEQ ID NO: 994 - RNA, 21 nt, Artificial Sequence
  Description of Artificial Sequence: Synthetic oligonucleotide
  misc_feature (20)..(21): nn is a deoxythymidine dinucleotide
ucugcuuuuucauggaccann

SEQ ID NO: 995 - RNA, 21 nt, Artificial Sequence
  Description of Artificial Sequence: Synthetic oligonucleotide
  misc_feature (20)..(21): nn is a deoxythymidine dinucleotide
ugcccaagucaucugcuuunn

SEQ ID NO: 996 - RNA, 21 nt, Artificial Sequence
  Description of Artificial Sequence: Synthetic oligonucleotide
  misc_feature (20)..(21): nn is a deoxythymidine dinucleotide
uuuugcccaagucaucugcnn

SEQ ID NO: 997 - RNA, 21 nt, Artificial Sequence
  Description of Artificial Sequence: Synthetic oligonucleotide
  misc_feature (20)..(21): nn is a deoxythymidine dinucleotide
ucaccuuugcccaagucaunn

SEQ ID NO: 998 - RNA, 21 nt, Artificial Sequence
  Description of Artificial Sequence: Synthetic oligonucleotide
  misc_feature (20)..(21): nn is a deoxythymidine dinucleotide
uccaccuuugcccaagucann

SEQ ID NO: 999 - RNA, 21 nt, Artificial Sequence
  Description of Artificial Sequence: Synthetic oligonucleotide
  misc_feature (20)..(21): nn is a deoxythymidine dinucleotide
uuccaccuuugcccaagucnn

SEQ ID NO: 1000 - RNA, 21 nt, Artificial Sequence
  Description of Artificial Sequence: Synthetic oligonucleotide
  misc_feature (20)..(21): nn is a deoxythymidine dinucleotide
ucguuuccugucuuuguacnn

SEQ ID NO: 1001 - RNA, 21 nt, Artificial Sequence
  Description of Artificial Sequence: Synthetic oligonucleotide
  misc_feature (20)..(21): nn is a deoxythymidine dinucleotide
uagcguuuccugucuuugunn

SEQ ID NO: 1002 - RNA, 21 nt, Artificial Sequence
  Description of Artificial Sequence: Synthetic oligonucleotide
  misc_feature (20)..(21): nn is a deoxythymidine dinucleotide
ucagcguuuccugucuuugnn

SEQ ID NO: 1003 - RNA, 21 nt, Artificial Sequence
  Description of Artificial Sequence: Synthetic oligonucleotide
  misc_feature (20)..(21): nn is a deoxythymidine dinucleotide
ucgacuuccagcguuuccunn

SEQ ID NO: 1004 - RNA, 21 nt, Artificial Sequence
  Description of Artificial Sequence: Synthetic oligonucleotide
  misc_feature (20)..(21): nn is a deoxythymidine dinucleotide
ucaccacaagccaaacgacnn

SEQ ID NO: 1005 - RNA, 21 nt, Artificial Sequence
  Description of Artificial Sequence: Synthetic oligonucleotide
  misc_feature (20)..(21): nn is a deoxythymidine dinucleotide
uacaccacaagccaaacgann

SEQ ID NO: 1006 - RNA, 21 nt, Artificial Sequence
  Description of Artificial Sequence: Synthetic oligonucleotide
  misc_feature (20)..(21): nn is a deoxythymidine dinucleotide
uuacaccacaagccaaacgnn

SEQ ID NO: 1007 - RNA, 21 nt, Artificial Sequence
  Description of Artificial Sequence: Synthetic oligonucleotide
  misc_feature (20)..(21): nn is a deoxythymidine dinucleotide
uuuacaccacaagccaaacnn

SEQ ID NO: 1008 - RNA, 21 nt, Artificial Sequence
  Description of Artificial Sequence: Synthetic oligonucleotide
  misc_feature (20)..(21): nn is a deoxythymidine dinucleotide
uaauuacaccacaagccaann

SEQ ID NO: 1009 - RNA, 21 nt, Artificial Sequence
  Description of Artificial Sequence: Synthetic oligonucleotide
  misc_feature (20)..(21): nn is a deoxythymidine dinucleotide
uccaauuacaccacaagccnn

SEQ ID NO: 1010 - RNA, 21 nt, Artificial Sequence
  Description of Artificial Sequence: Synthetic oligonucleotide
  misc_feature (20)..(21): nn is a deoxythymidine dinucleotide
ucccaauuacaccacaagcnn

SEQ ID NO: 1011 - RNA, 21 nt, Artificial Sequence
  Description of Artificial Sequence: Synthetic oligonucleotide
  misc_feature (20)..(21): nn is a deoxythymidine dinucleotide
uucccaauuacaccacaagnn

SEQ ID NO: 1012 - RNA, 21 nt, Artificial Sequence
  Description of Artificial Sequence: Synthetic oligonucleotide
  misc_feature (20)..(21): nn is a deoxythymidine dinucleotide
ugaucccaauuacaccacann

SEQ ID NO: 1013 - RNA, 21 nt, Artificial Sequence
  Description of Artificial Sequence: Synthetic oligonucleotide
  misc_feature (20)..(21): nn is a deoxythymidine dinucleotide
ucgaucccaauuacaccacnn

SEQ ID NO: 1014 - RNA, 21 nt, Artificial Sequence
  Description of Artificial Sequence: Synthetic oligonucleotide
  misc_feature (20)..(21): nn is a deoxythymidine dinucleotide
ugcgaucccaauuacaccann

SEQ ID NO: 1015 - RNA, 21 nt, Artificial Sequence
  Description of Artificial Sequence: Synthetic oligonucleotide
  misc_feature (20)..(21): nn is a deoxythymidine dinucleotide
uuugggcgaucccaauuacnn

SEQ ID NO: 1016 - RNA, 21 nt, Artificial Sequence
  Description of Artificial Sequence: Synthetic oligonucleotide
  misc_feature (20)..(21): nn is a deoxythymidine dinucleotide
uauugggcgaucccaauuann

SEQ ID NO: 1017 - RNA, 21 nt, Artificial Sequence
  Description of Artificial Sequence: Synthetic oligonucleotide
  misc_feature (20)..(21): nn is a deoxythymidine dinucleotide
uuauugggcgaucccaauunn

SEQ ID NO: 1018 - RNA, 21 nt, Artificial Sequence
  Description of Artificial Sequence: Synthetic oligonucleotide
  misc_feature (20)..(21): nn is a deoxythymidine dinucleotide
uuuauugggcgaucccaaunn

SEQ ID NO: 1019 - RNA, 21 nt, Artificial Sequence
  Description of Artificial Sequence: Synthetic oligonucleotide
  misc_feature (20)..(21): nn is a deoxythymidine dinucleotide
uuuuauugggcgaucccaann

SEQ ID NO: 1020 - RNA, 21 nt, Artificial Sequence
  Description of Artificial Sequence: Synthetic oligonucleotide
  misc_feature (20)..(21): n is a, c, g, or u
uguuuauugggcgaucccann

SEQ ID NO: 1021 - RNA, 21 nt, Artificial Sequence
  Description of Artificial Sequence: Synthetic oligonucleotide
  misc_feature (20)..(21): nn is a deoxythymidine dinucleotide
uuguuuauugggcgaucccnn

SEQ ID NO: 1022 - RNA, 21 nt, Artificial Sequence
  Description of Artificial Sequence: Synthetic oligonucleotide
  misc_feature (20)..(21): nn is a deoxythymidine dinucleotide
ugaauguuuauugggcgaunn

SEQ ID NO: 1023 - RNA, 21 nt, Artificial Sequence
  Description of Artificial Sequence: Synthetic oligonucleotide
  misc_feature (20)..(21): nn is a deoxythymidine dinucleotide
ucaagggaauguuuauuggnn

SEQ ID NO: 1024 - RNA, 21 nt, Artificial Sequence
  Description of Artificial Sequence: Synthetic oligonucleotide
  misc_feature (20)..(21): nn is a deoxythymidine dinucleotide
uccaagggaauguuuauugnn

SEQ ID NO: 1025 - RNA, 21 nt, Artificial Sequence
  Description of Artificial Sequence: Synthetic oligonucleotide
  misc_feature (20)..(21): nn is a deoxythymidine dinucleotide
uuccaagggaauguuuauunn

SEQ ID NO: 1026 - RNA, 21 nt, Artificial Sequence
  Description of Artificial Sequence: Synthetic oligonucleotide
  misc_feature (20)..(21): nn is a deoxythymidine dinucleotide
uauccaagggaauguuuaunn

SEQ ID NO: 1027 - RNA, 21 nt, Artificial Sequence
  Description of Artificial Sequence: Synthetic oligonucleotide
  misc_feature (20)..(21): nn is a deoxythymidine dinucleotide
ucauccaagggaauguuuann

SEQ ID NO: 1028 - RNA, 21 nt, Artificial Sequence
  Description of Artificial Sequence: Synthetic oligonucleotide
  misc_feature (20)..(21): nn is a deoxythymidine dinucleotide
uacauccaagggaauguuunn

SEQ ID NO: 1029 - RNA, 21 nt, Artificial Sequence
  Description of Artificial Sequence: Synthetic oligonucleotide
  misc_feature (20)..(21): nn is a deoxythymidine dinucleotide
uuacauccaagggaauguunn

SEQ ID NO: 1030 - RNA, 21 nt, Artificial Sequence
  Description of Artificial Sequence: Synthetic oligonucleotide
  misc_feature (20)..(21): nn is a deoxythymidine dinucleotide
ugacuacauccaagggaaunn

SEQ ID NO: 1031 - RNA, 21 nt, Artificial Sequence
  Description of Artificial Sequence: Synthetic oligonucleotide
  misc_feature (20)..(21): n is a, c, g, or u
uccucagacuacauccaagnn

SEQ ID NO: 1032 - RNA, 21 nt, Artificial Sequence
  Description of Artificial Sequence: Synthetic oligonucleotide
  misc_feature (20)..(21): nn is a deoxythymidine dinucleotide
uugaguuaaggggccucagnn

SEQ ID NO: 1033 - RNA, 21 nt, Artificial Sequence
  Description of Artificial Sequence: Synthetic oligonucleotide
  misc_feature (20)..(21): nn is a deoxythymidine dinucleotide
ugaugaguuaaggggccucnn

SEQ ID NO: 1034 - RNA, 21 nt, Artificial Sequence
  Description of Artificial Sequence: Synthetic oligonucleotide
  misc_feature (20)..(21): nn is a deoxythymidine dinucleotide
uagaugaguuaaggggccunn

SEQ ID NO: 1035 - RNA, 21 nt, Artificial Sequence
  Description of Artificial Sequence: Synthetic oligonucleotide
  misc_feature (20)..(21): nn is a deoxythymidine dinucleotide
uaacagaugaguuaaggggnn

SEQ ID NO: 1036 - RNA, 21 nt, Artificial Sequence
  Description of Artificial Sequence: Synthetic oligonucleotide
  misc_feature (20)..(21): nn is a deoxythymidine dinucleotide
uuaacagaugaguuaagggnn

SEQ ID NO: 1037 - RNA, 21 nt, Artificial Sequence
  Description of Artificial Sequence: Synthetic oligonucleotide
  misc_feature (20)..(21): nn is a deoxythymidine dinucleotide
uauaacagaugaguuaaggnn

SEQ ID NO: 1038 - RNA, 21 nt, Artificial Sequence
  Description of Artificial Sequence: Synthetic oligonucleotide
  misc_feature (20)..(21): nn is a deoxythymidine dinucleotide
ugauaacagaugaguuaagnn

SEQ ID NO: 1039 - RNA, 21 nt, Artificial Sequence
  Description of Artificial Sequence: Synthetic oligonucleotide
  misc_feature (20)..(21): nn is a deoxythymidine dinucleotide
uggauaacagaugaguuaann

SEQ ID NO: 1040 - RNA, 21 nt, Artificial Sequence
  Description of Artificial Sequence: Synthetic oligonucleotide
  misc_feature (20)..(21): nn is a deoxythymidine dinucleotide
uaggauaacagaugaguuann

SEQ ID NO: 1041 - RNA, 21 nt, Artificial Sequence
  Description of Artificial Sequence: Synthetic oligonucleotide
  misc_feature (20)..(21): nn is a deoxythymidine dinucleotide
ucaggauaacagaugaguunn

SEQ ID NO: 1042 - RNA, 21 nt, Artificial Sequence
  Description of Artificial Sequence: Synthetic oligonucleotide
  misc_feature (20)..(21): nn is a deoxythymidine dinucleotide
uuacagcuagcaggauaacnn

SEQ ID NO: 1043 - RNA, 21 nt, Artificial Sequence
  Description of Artificial Sequence: Synthetic oligonucleotide
  misc_feature (20)..(21): nn is a deoxythymidine dinucleotide
ucauuucuacagcuagcagnn

SEQ ID NO: 1044 - RNA, 21 nt, Artificial Sequence
  Description of Artificial Sequence: Synthetic oligonucleotide
  misc_feature (20)..(21): nn is a deoxythymidine dinucleotide
uacauuucuacagcuagcann

SEQ ID NO: 1045 - RNA, 21 nt, Artificial Sequence
  Description of Artificial Sequence: Synthetic oligonucleotide
  misc_feature (20)..(21): nn is a deoxythymidine dinucleotide
uaggauacauuucuacagcnn

SEQ ID NO: 1046 - RNA, 21 nt, Artificial Sequence
  Description of Artificial Sequence: Synthetic oligonucleotide
  misc_feature (20)..(21): nn is a deoxythymidine dinucleotide
ucaggauacauuucuacagnn

SEQ ID NO: 1047 - RNA, 21 nt, Artificial Sequence
  Description of Artificial Sequence: Synthetic oligonucleotide
  misc_feature (20)..(21): nn is a deoxythymidine dinucleotide
uucaggauacauuucuacann

SEQ ID NO: 1048 - RNA, 21 nt, Artificial Sequence
  Description of Artificial Sequence: Synthetic oligonucleotide
  misc_feature (20)..(21): nn is a deoxythymidine dinucleotide
uaucaggauacauuucuacnn

SEQ ID NO: 1049 - RNA, 21 nt, Artificial Sequence
  Description of Artificial Sequence: Synthetic oligonucleotide
  misc_feature (20)..(21): nn is a deoxythymidine dinucleotide
uguuuaucaggauacauuunn

SEQ ID NO: 1050 - RNA, 21 nt, Artificial Sequence
  Description of Artificial Sequence: Synthetic oligonucleotide
  misc_feature (20)..(21): nn is a deoxythymidine dinucleotide
uuaauguuuaucaggauacnn

SEQ ID NO: 1051 - RNA, 21 nt, Artificial Sequence
  Description of Artificial Sequence: Synthetic oligonucleotide
  misc_feature (20)..(21): nn is a deoxythymidine dinucleotide
uuaagauuacaguguuuaann

SEQ ID NO: 1052 - RNA, 21 nt, Artificial Sequence
  Description of Artificial Sequence: Synthetic oligonucleotide
  misc_feature (20)..(21): nn is a deoxythymidine dinucleotide
ucacuuuuaagauuacagunn

SEQ ID NO: 1053 - RNA, 21 nt, Artificial Sequence
  Description of Artificial Sequence: Synthetic oligonucleotide
  misc_feature (20)..(21): nn is a deoxythymidine dinucleotide
uacacuuuuaagauuacagnn

SEQ ID NO: 1054 - RNA, 21 nt, Artificial Sequence
  Description of Artificial Sequence: Synthetic oligonucleotide
  misc_feature (20)..(21): nn is a deoxythymidine dinucleotide
uuacacuuuuaagauuacann

SEQ ID NO: 1055 - RNA, 21 nt, Artificial Sequence
  Description of Artificial Sequence: Synthetic oligonucleotide
  misc_feature (20)..(21): nn is a deoxythymidine dinucleotide
uuuacacuuuuaagauuacnn

SEQ ID NO: 1056 - RNA, 21 nt, Artificial Sequence
  Description of Artificial Sequence: Synthetic oligonucleotide
  misc_feature (20)..(21): nn is a deoxythymidine dinucleotide
ucacaauuacacuuuuaagnn

SEQ ID NO: 1057 - RNA, 21 nt, Artificial Sequence
  Description of Artificial Sequence: Synthetic oligonucleotide
  misc_feature (20)..(21): nn is a deoxythymidine dinucleotide
uaguuucucacuacagguann

SEQ ID NO: 1058 - RNA, 21 nt, Artificial Sequence
  Description of Artificial Sequence: Synthetic oligonucleotide
  misc_feature (20)..(21): nn is a deoxythymidine dinucleotide
uucuuccaagugaucauaann

SEQ ID NO: 1059 - RNA, 21 nt, Artificial Sequence
  Description of Artificial Sequence: Synthetic oligonucleotide
  misc_feature (20)..(21): nn is a deoxythymidine dinucleotide
uaaucuuccaagugaucaunn

SEQ ID NO: 1060 - RNA, 21 nt, Artificial Sequence
  Description of Artificial Sequence: Synthetic oligonucleotide
  misc_feature (20)..(21): nn is a deoxythymidine dinucleotide
uacaaaucuuccaagugaunn

SEQ ID NO: 1061 - RNA, 21 nt, Artificial Sequence
  Description of Artificial Sequence: Synthetic oligonucleotide
  misc_feature (20)..(21): nn is a deoxythymidine dinucleotide
uaacuauacaaaucuuccann

SEQ ID NO: 1062 - RNA, 21 nt, Artificial Sequence
  Description of Artificial Sequence: Synthetic oligonucleotide
  misc_feature (20)..(21): nn is a deoxythymidine dinucleotide
uuuuuaacugaguuuuauann

SEQ ID NO: 1063 - RNA, 21 nt, Artificial Sequence
  Description of Artificial Sequence: Synthetic oligonucleotide
  misc_feature (20)..(21): nn is a deoxythymidine dinucleotide
ugacauuuuaacugaguuunn

SEQ ID NO: 1064 - RNA, 21 nt, Artificial Sequence
  Description of Artificial Sequence: Synthetic oligonucleotide
  misc_feature (20)..(21): nn is a deoxythymidine dinucleotide
ucaggucauugaaacagacnn

SEQ ID NO: 1065 - RNA, 21 nt, Artificial Sequence
  Description of Artificial Sequence: Synthetic oligonucleotide
  misc_feature (20)..(21): nn is a deoxythymidine dinucleotide
uuggcaaaauacaggucaunn

SEQ ID NO: 1066 - RNA, 21 nt, Artificial Sequence
  Description of Artificial Sequence: Synthetic oligonucleotide
  misc_feature (20)..(21): nn is a deoxythymidine dinucleotide
ugucuggcaaaauacaggunn

SEQ ID NO: 1067 - RNA, 21 nt, Artificial Sequence
  Description of Artificial Sequence: Synthetic oligonucleotide
  misc_feature (20)..(21): nn is a deoxythymidine dinucleotide
uagucuggcaaaauacaggnn

SEQ ID NO: 1068 - RNA, 21 nt, Artificial Sequence
  Description of Artificial Sequence: Synthetic oligonucleotide
  misc_feature (20)..(21): nn is a deoxythymidine dinucleotide
uauacccaucugugauuuann

SEQ ID NO: 1069 - RNA, 21 nt, Artificial Sequence
  Description of Artificial Sequence: Synthetic oligonucleotide
  misc_feature (20)..(21): nn is a deoxythymidine dinucleotide
uuuaauacccaucugugaunn

SEQ ID NO: 1070 - RNA, 21 nt, Artificial Sequence
  Description of Artificial Sequence: Synthetic oligonucleotide
  misc_feature (20)..(21): nn is a deoxythymidine dinucleotide
uuuuaauacccaucugugann

SEQ ID NO: 1071 - RNA, 21 nt, Artificial Sequence
  Description of Artificial Sequence: Synthetic oligonucleotide
  misc_feature (20)..(21): nn is a deoxythymidine dinucleotide
uaguuuaauacccaucugunn

SEQ ID NO: 1072 - RNA, 21 nt, Artificial Sequence
  Description of Artificial Sequence: Synthetic oligonucleotide
  misc_feature (20)..(21): nn is a deoxythymidine dinucleotide
uaaguuuaauacccaucugnn

SEQ ID NO: 1073 - RNA, 21 nt, Artificial Sequence
  Description of Artificial Sequence: Synthetic oligonucleotide
  misc_feature (20)..(21): nn is a deoxythymidine dinucleotide
ucaaguuuaauacccaucunn

SEQ ID NO: 1074 - RNA, 21 nt, Artificial Sequence
  Description of Artificial Sequence: Synthetic oligonucleotide
  misc_feature (20)..(21): nn is a deoxythymidine dinucleotide
ugacaaguuuaauacccaunn

SEQ ID NO: 1075 - RNA, 21 nt, Artificial Sequence
  Description of Artificial Sequence: Synthetic oligonucleotide
  misc_feature (20)..(21): nn is a deoxythymidine dinucleotide
ugaaauucugacaaguuuann

SEQ ID NO: 1076 - RNA, 21 nt, Artificial Sequence
  Description of Artificial Sequence: Synthetic oligonucleotide
  misc_feature (20)..(21): nn is a deoxythymidine dinucleotide
uauucacaggcuugaaugann

SEQ ID NO: 1077 - RNA, 21 nt, Artificial Sequence
  Description of Artificial Sequence: Synthetic oligonucleotide
  misc_feature (20)..(21): nn is a deoxythymidine dinucleotide
uuauucacaggcuugaaugnn

SEQ ID NO: 1078 - RNA, 21 nt, Artificial Sequence
  Description of Artificial Sequence: Synthetic oligonucleotide
  misc_feature (20)..(21): nn is a deoxythymidine dinucleotide
uccauacaggguuuuuauunn

SEQ ID NO: 1079 - RNA, 21 nt, Artificial Sequence
  Description of Artificial Sequence: Synthetic oligonucleotide
  misc_feature (20)..(21): nn is a deoxythymidine dinucleotide
ugccauacaggguuuuuaunn

SEQ ID NO: 1080 - RNA, 21 nt, Artificial Sequence
  Description of Artificial Sequence: Synthetic oligonucleotide
  misc_feature (20)..(21): nn is a deoxythymidine dinucleotide
uuaagugccauacaggguunn

SEQ ID NO: 1081 - RNA, 21 nt, Artificial Sequence
  Description of Artificial Sequence: Synthetic oligonucleotide
  misc_feature (20)..(21): nn is a deoxythymidine dinucleotide
uauaagugccauacagggunn

SEQ ID NO: 1082 - RNA, 21 nt, Artificial Sequence
  Description of Artificial Sequence: Synthetic oligonucleotide
  misc_feature (20)..(21): nn is a deoxythymidine dinucleotide
ugauucuuuuaauagccucnn

SEQ ID NO: 1083 - RNA, 21 nt, Artificial Sequence
  Description of Artificial Sequence: Synthetic oligonucleotide
  misc_feature (20)..(21): nn is a deoxythymidine dinucleotide
uuuugaauuuggauucuuunn

SEQ ID NO: 1084 - RNA, 21 nt, Artificial Sequence
  Description of Artificial Sequence: Synthetic oligonucleotide
  misc_feature (20)..(21): nn is a deoxythymidine dinucleotide
uuaguuugaauuuggauucnn

SEQ ID NO: 1085 - RNA, 21 nt, Artificial Sequence
  Description of Artificial Sequence: Synthetic oligonucleotide
  misc_feature (20)..(21): nn is a deoxythymidine dinucleotide
cggaggucuggccuauaacnn

SEQ ID NO: 1086 - RNA, 21 nt, Artificial Sequence
  Description of Artificial Sequence: Synthetic oligonucleotide
  misc_feature (20)..(21): nn is a deoxythymidine dinucleotide
ggaggucuggccuauaaacnn

SEQ ID NO: 1087 - RNA, 21 nt, Artificial Sequence
  Description of Artificial Sequence: Synthetic oligonucleotide
  misc_feature (20)..(21): nn is a deoxythymidine dinucleotide
gaggucuggccuauaaagcnn

SEQ ID NO: 1088 - RNA, 21 nt, Artificial Sequence
  Description of Artificial Sequence: Synthetic oligonucleotide
  misc_feature (20)..(21): nn is a deoxythymidine dinucleotide
aggucuggccuauaaagucnn

SEQ ID NO: 1089 - RNA, 21 nt, Artificial Sequence
  Description of Artificial Sequence: Synthetic oligonucleotide
  misc_feature (20)..(21): nn is a deoxythymidine dinucleotide
ggucuggccuauaaaguacnn

SEQ ID NO: 1090 - RNA, 21 nt, Artificial Sequence
  Description of Artificial Sequence: Synthetic oligonucleotide
  misc_feature (20)..(21): nn is a deoxythymidine dinucleotide
ucuggccuauaaaguagucnn

SEQ ID NO: 1091 - RNA, 21 nt, Artificial Sequence
  Description of Artificial Sequence: Synthetic oligonucleotide
  misc_feature (20)..(21): nn is a deoxythymidine dinucleotide
cuggccuauaaaguaguccnn

SEQ ID NO: 1092 - RNA, 21 nt, Artificial Sequence
  Description of Artificial Sequence: Synthetic oligonucleotide
  misc_feature (20)..(21): nn is a deoxythymidine dinucleotide
uggccuauaaaguagucgcnn

SEQ ID NO: 1093 - RNA, 21 nt, Artificial Sequence
  Description of Artificial Sequence: Synthetic oligonucleotide
  misc_feature (20)..(21): nn is a deoxythymidine dinucleotide
ggccuauaaaguagucgccnn

SEQ ID NO: 1094 - RNA, 21 nt, Artificial Sequence
  Description of Artificial Sequence: Synthetic oligonucleotide
  misc_feature (20)..(21): nn is a deoxythymidine dinucleotide
gccuauaaaguagucgcgcnn

SEQ ID NO: 1095 - RNA, 21 nt, Artificial Sequence
  Description of Artificial Sequence: Synthetic oligonucleotide
  misc_feature (20)..(21): nn is a deoxythymidine dinucleotide
ccuauaaaguagucgcggcnn

SEQ ID NO: 1096 - RNA, 21 nt, Artificial Sequence
  Description of Artificial Sequence: Synthetic oligonucleotide
  misc_feature (20)..(21): nn is a deoxythymidine dinucleotide
gucguagucuccugcagccnn

SEQ ID NO: 1097 - RNA, 21 nt, Artificial Sequence
  Description of Artificial Sequence: Synthetic oligonucleotide
  misc_feature (20)..(21): nn is a deoxythymidine dinucleotide
cguagucuccugcagcgucnn

SEQ ID NO: 1098 - RNA, 21 nt, Artificial Sequence
  Description of Artificial Sequence: Synthetic oligonucleotide
  misc_feature (20)..(21): nn is a deoxythymidine dinucleotide
guagucuccugcagcguccnn

SEQ ID NO: 1099 - RNA, 21 nt, Artificial Sequence
  Description of Artificial Sequence: Synthetic oligonucleotide
  misc_feature (20)..(21): nn is a deoxythymidine dinucleotide
uagucuccugcagcgucucnn

SEQ ID NO: 1100 - RNA, 21 nt, Artificial Sequence
  Description of Artificial Sequence: Synthetic oligonucleotide
  misc_feature (20)..(21): nn is a deoxythymidine dinucleotide
auggcgacgaaggccgugcnn

SEQ ID NO: 1101 - RNA, 21 nt, Artificial Sequence
  Description of Artificial Sequence: Synthetic oligonucleotide
  misc_feature (20)..(21): nn is a deoxythymidine dinucleotide
cgacgaaggccgugugcgcnn

SEQ ID NO: 1102 - RNA, 21 nt, Artificial Sequence
  Description of Artificial Sequence: Synthetic oligonucleotide
  misc_feature (20)..(21): nn is a deoxythymidine dinucleotide
gaaggccgugugcgugcucnn

SEQ ID NO: 1103 - RNA, 21 nt, Artificial Sequence
  Description of Artificial Sequence: Synthetic oligonucleotide
  misc_feature (20)..(21): nn is a deoxythymidine dinucleotide
ggccgugugcgugcugaacnn

SEQ ID NO: 1104 - RNA, 21 nt, Artificial Sequence
  Description of Artificial Sequence: Synthetic oligonucleotide
  misc_feature (20)..(21): nn is a deoxythymidine dinucleotide
agggcgacggcccagugccnn

SEQ ID NO: 1105 - RNA, 21 nt, Artificial Sequence
  Description of Artificial Sequence: Synthetic oligonucleotide
  misc_feature (20)..(21): nn is a deoxythymidine dinucleotide
ugcagggcaucaucaauucnn

SEQ ID NO: 1106 - RNA, 21 nt, Artificial Sequence
  Description of Artificial Sequence: Synthetic oligonucleotide
  misc_feature (20)..(21): nn is a deoxythymidine dinucleotide
gcagggcaucaucaauuucnn

SEQ ID NO: 1107 - RNA, 21 nt, Artificial Sequence
  Description of Artificial Sequence: Synthetic oligonucleotide
  misc_feature (20)..(21): nn is a deoxythymidine dinucleotide
agggcaucaucaauuucgcnn

SEQ ID NO: 1108 - RNA, 21 nt, Artificial Sequence
  Description of Artificial Sequence: Synthetic oligonucleotide
  misc_feature (20)..(21): nn is a deoxythymidine dinucleotide
gggcaucaucaauuucgacnn

SEQ ID NO: 1109 - RNA, 21 nt, Artificial Sequence
  Description of Artificial Sequence: Synthetic oligonucleotide
  misc_feature (20)..(21): nn is a deoxythymidine dinucleotide
ggcaucaucaauuucgagcnn

SEQ ID NO: 1110 - RNA, 21 nt, Artificial Sequence
  Description of Artificial Sequence: Synthetic oligonucleotide
  misc_feature (20)..(21): nn is a deoxythymidine dinucleotide
gcaucaucaauuucgagccnn

SEQ ID NO: 1111 - RNA, 21 nt, Artificial Sequence
  Description of Artificial Sequence: Synthetic oligonucleotide
  misc_feature (20)..(21): nn is a deoxythymidine dinucleotide
caucaucaauuucgagcacnn

SEQ ID NO: 1112 - RNA, 21 nt, Artificial Sequence
  Description of Artificial Sequence: Synthetic oligonucleotide
  misc_feature (20)..(21): nn is a deoxythymidine dinucleotide
aauuucgagcagaaggaacnn

SEQ ID NO: 1113 - RNA, 21 nt, Artificial Sequence
  Description of Artificial Sequence: Synthetic oligonucleotide
  misc_feature (20)..(21): nn is a deoxythymidine dinucleotide
uucgagcagaaggaaagucnn

SEQ ID NO: 1114 - RNA, 21 nt, Artificial Sequence
  Description of Artificial Sequence: Synthetic oligonucleotide
  misc_feature (20)..(21): nn is a deoxythymidine dinucleotide
ucgagcagaaggaaaguacnn

SEQ ID NO: 1115 - RNA, 21 nt, Artificial Sequence
  Description of Artificial Sequence: Synthetic oligonucleotide
  misc_feature (20)..(21): nn is a deoxythymidine dinucleotide
aagguguggggaagcauucnn

SEQ ID NO: 1116 - RNA, 21 nt, Artificial Sequence
  Description of Artificial Sequence: Synthetic oligonucleotide
  misc_feature (20)..(21): nn is a deoxythymidine dinucleotide
gguguggggaagcauuaacnn

SEQ ID NO: 1117 - RNA, 21 nt, Artificial Sequence
  Description of Artificial Sequence: Synthetic oligonucleotide
  misc_feature (20)..(21): nn is a deoxythymidine dinucleotide
gacugacugaaggccugccnn

SEQ ID NO: 1118 - RNA, 21 nt, Artificial Sequence
  Description of Artificial Sequence: Synthetic oligonucleotide
  misc_feature (20)..(21): nn is a deoxythymidine dinucleotide
cugacugaaggccugcaucnn

SEQ ID NO: 1119 - RNA, 21 nt, Artificial Sequence
  Description of Artificial Sequence: Synthetic oligonucleotide
  misc_feature (20)..(21): nn is a deoxythymidine dinucleotide
ugacugaaggccugcaugcnn

SEQ ID NO: 1120 - RNA, 21 nt, Artificial Sequence
  Description of Artificial Sequence: Synthetic oligonucleotide
  misc_feature (20)..(21): nn is a deoxythymidine dinucleotide
ugaaggccugcauggauucnn

SEQ ID NO: 1121 - RNA, 21 nt, Artificial Sequence
  Description of Artificial Sequence: Synthetic oligonucleotide
  misc_feature (20)..(21): nn is a deoxythymidine dinucleotide
gaaggccugcauggauuccnn

SEQ ID NO: 1122 - RNA, 21 nt, Artificial Sequence
  Description of Artificial Sequence: Synthetic oligonucleotide
  misc_feature (20)..(21): nn is a deoxythymidine dinucleotide
ugcauggauuccauguuccnn

SEQ ID NO: 1123 - RNA, 21 nt, Artificial Sequence
  Description of Artificial Sequence: Synthetic oligonucleotide
  misc_feature (20)..(21): nn is a deoxythymidine dinucleotide
cauggauuccauguucaucnn

SEQ ID NO: 1124 - RNA, 21 nt, Artificial Sequence
  Description of Artificial Sequence: Synthetic oligonucleotide
  misc_feature (20)..(21): nn is a deoxythymidine dinucleotide
ggauuccauguucaugagcnn

SEQ ID NO: 1125 - RNA, 21 nt, Artificial Sequence
  Description of Artificial Sequence: Synthetic oligonucleotide
  misc_feature (20)..(21): nn is a deoxythymidine dinucleotide
uuccauguucaugaguuucnn

SEQ ID NO: 1126 - RNA, 21 nt, Artificial Sequence
  Description of Artificial Sequence: Synthetic oligonucleotide
  misc_feature (20)..(21): nn is a deoxythymidine dinucleotide
guucaugaguuuggagaucnn

SEQ ID NO: 1127 - RNA, 21 nt, Artificial Sequence
  Description of Artificial Sequence: Synthetic oligonucleotide
  misc_feature (20)..(21): nn is a deoxythymidine dinucleotide
uucaugaguuuggagauacnn

SEQ ID NO: 1128 - RNA, 21 nt, Artificial Sequence
  Description of Artificial Sequence: Synthetic oligonucleotide
  misc_feature (20)..(21): nn is a deoxythymidine dinucleotide
ugaguuuggagauaauaccnn

SEQ ID NO: 1129 - RNA, 21 nt, Artificial Sequence
  Description of Artificial Sequence: Synthetic oligonucleotide
  misc_feature (20)..(21): nn is a deoxythymidine dinucleotide
gaguuuggagauaauacacnn

SEQ ID NO: 1130 - RNA, 21 nt, Artificial Sequence
  Description of Artificial Sequence: Synthetic oligonucleotide
  misc_feature (20)..(21): nn is a deoxythymidine dinucleotide
aggcuguaccagugcaggcnn

SEQ ID NO: 1131 - RNA, 21 nt, Artificial Sequence
  Description of Artificial Sequence: Synthetic oligonucleotide
  misc_feature (20)..(21): nn is a deoxythymidine dinucleotide
ggcuguaccagugcaggucnn

SEQ ID NO: 1132 - RNA, 21 nt, Artificial Sequence
  Description of Artificial Sequence: Synthetic oligonucleotide
  misc_feature (20)..(21): nn is a deoxythymidine dinucleotide
gcagguccucacuuuaaucnn

SEQ ID NO: 1133 - RNA, 21 nt, Artificial Sequence
  Description of Artificial Sequence: Synthetic oligonucleotide
  misc_feature (20)..(21): nn is a deoxythymidine dinucleotide
cagguccucacuuuaauccnn

SEQ ID NO: 1134 - RNA, 21 nt, Artificial Sequence
  Description of Artificial Sequence: Synthetic oligonucleotide
  misc_feature (20)..(21): nn is a deoxythymidine dinucleotide
ucacuuuaauccucuauccnn

SEQ ID NO: 1135 - RNA, 21 nt, Artificial Sequence
  Description of Artificial Sequence: Synthetic oligonucleotide
  misc_feature (20)..(21): nn is a deoxythymidine dinucleotide
cuauccagaaaacacggucnn

SEQ ID NO: 1136 - RNA, 21 nt, Artificial Sequence
  Description of Artificial Sequence: Synthetic oligonucleotide
  misc_feature (20)..(21): nn is a deoxythymidine dinucleotide
uauccagaaaacacggugcnn

SEQ ID NO: 1137 - RNA, 21 nt, Artificial Sequence
  Description of Artificial Sequence: Synthetic oligonucleotide
  misc_feature (20)..(21): nn is a deoxythymidine dinucleotide
auccagaaaacacgguggcnn

SEQ ID NO: 1138 - RNA, 21 nt, Artificial Sequence
  Description of Artificial Sequence: Synthetic oligonucleotide
  misc_feature (20)..(21): nn is a deoxythymidine dinucleotide
ccagaaaacacggugggccnn

SEQ ID NO: 1139 - RNA, 21 nt, Artificial Sequence
  Description of Artificial Sequence: Synthetic oligonucleotide
  misc_feature (20)..(21): nn is a deoxythymidine dinucleotide
gaaaacacggugggccaacnn

SEQ ID NO: 1140 - RNA, 21 nt, Artificial Sequence
  Description of Artificial Sequence: Synthetic oligonucleotide
  misc_feature (20)..(21): nn is a deoxythymidine dinucleotide
aaaacacggugggccaaacnn

SEQ ID NO: 1141 - RNA, 21 nt, Artificial Sequence
  Description of Artificial Sequence: Synthetic oligonucleotide
  misc_feature (20)..(21): nn is a deoxythymidine dinucleotide
cggugggccaaaggaugacnn

SEQ ID NO: 1142 - RNA, 21 nt, Artificial Sequence
  Description of Artificial Sequence: Synthetic oligonucleotide
  misc_feature (20)..(21): nn is a deoxythymidine dinucleotide
aggaugaagagaggcaugcnn

SEQ ID NO: 1143 - RNA, 21 nt, Artificial Sequence
  Description of Artificial Sequence: Synthetic oligonucleotide
  misc_feature (20)..(21): nn is a deoxythymidine dinucleotide
augaagagaggcauguugcnn

SEQ ID NO: 1144 - RNA, 21 nt, Artificial Sequence
  Description of Artificial Sequence: Synthetic oligonucleotide
  misc_feature (20)..(21): nn is a deoxythymidine dinucleotide
gagaggcauguuggagaccnn

SEQ ID NO: 1145 - RNA, 21 nt, Artificial Sequence
  Description of Artificial Sequence: Synthetic oligonucleotide
  misc_feature (20)..(21): nn is a deoxythymidine dinucleotide
agaggcauguuggagacucnn

SEQ ID NO: 1146 - RNA, 21 nt, Artificial Sequence
  Description of Artificial Sequence: Synthetic oligonucleotide
  misc_feature (20)..(21): nn is a deoxythymidine dinucleotide
auguuggagacuugggcacnn

SEQ ID NO: 1147 - RNA, 21 nt, Artificial Sequence
  Description of Artificial Sequence: Synthetic oligonucleotide
  misc_feature (20)..(21): nn is a deoxythymidine dinucleotide
guuggagacuugggcaaucnn

SEQ ID NO: 1148 - RNA, 21 nt, Artificial Sequence
  Description of Artificial Sequence: Synthetic oligonucleotide
  misc_feature (20)..(21): nn is a deoxythymidine dinucleotide
ggagacuugggcaaugugcnn

SEQ ID NO: 1149 - RNA, 21 nt, Artificial Sequence
  Description of Artificial Sequence: Synthetic oligonucleotide
  misc_feature (20)..(21): nn is a deoxythymidine dinucleotide
ggcaaugugacugcugaccnn

SEQ ID NO: 1150 - RNA, 21 nt, Artificial Sequence
  Description of Artificial Sequence: Synthetic oligonucleotide
  misc_feature (20)..(21): nn is a deoxythymidine dinucleotide
caaugugacugcugacaacnn

SEQ ID NO: 1151 - RNA, 21 nt, Artificial Sequence
  Description of Artificial Sequence: Synthetic oligonucleotide
  misc_feature (20)..(21): nn is a deoxythymidine dinucleotide
cugacaaagaugguguggcnn

SEQ ID NO: 1152 - RNA, 21 nt, Artificial Sequence
  Description of Artificial Sequence: Synthetic oligonucleotide
  misc_feature (20)..(21): nn is a deoxythymidine dinucleotide
ugacaaagaugguguggccnn

SEQ ID NO: 1153 - RNA, 21 nt, Artificial Sequence
  Description of Artificial Sequence: Synthetic oligonucleotide
  misc_feature (20)..(21): nn is a deoxythymidine dinucleotide
cucaggagaccauugcaucnn

SEQ ID NO: 1154 - RNA, 21 nt, Artificial Sequence
  Description of Artificial Sequence: Synthetic oligonucleotide
  misc_feature (20)..(21): nn is a deoxythymidine dinucleotide
ucaggagaccauugcauccnn

SEQ ID NO: 1155 - RNA, 21 nt, Artificial Sequence
  Description of Artificial Sequence: Synthetic oligonucleotide
  misc_feature (20)..(21): nn is a deoxythymidine dinucleotide
agaccauugcaucauuggcnn

SEQ ID NO: 1156 - RNA, 21 nt, Artificial Sequence
  Description of Artificial Sequence: Synthetic oligonucleotide
  misc_feature (20)..(21): nn is a deoxythymidine dinucleotide
gaccauugcaucauuggccnn

SEQ ID NO: 1157 - RNA, 21 nt, Artificial Sequence
  Description of Artificial Sequence: Synthetic oligonucleotide
  misc_feature (20)..(21): nn is a deoxythymidine dinucleotide
auugcaucauuggccgcacnn

SEQ ID NO: 1158 - RNA, 21 nt, Artificial Sequence
  Description of Artificial Sequence: Synthetic oligonucleotide
  misc_feature (20)..(21): nn is a deoxythymidine dinucleotide
cauuggccgcacacuggucnn

SEQ ID NO: 1159 - RNA, 21 nt, Artificial Sequence
  Description of Artificial Sequence: Synthetic oligonucleotide
  misc_feature (20)..(21): nn is a deoxythymidine dinucleotide
cgcacacuggugguccaucnn

SEQ ID NO: 1160 - RNA, 21 nt, Artificial Sequence
  Description of Artificial Sequence: Synthetic oligonucleotide
  misc_feature (20)..(21): nn is a deoxythymidine dinucleotide
cacacuggugguccaugacnn

SEQ ID NO: 1161 - RNA, 21 nt, Artificial Sequence
  Description of Artificial Sequence: Synthetic oligonucleotide
  misc_feature (20)..(21): nn is a deoxythymidine dinucleotide
acacuggugguccaugaacnn

SEQ ID NO: 1162 - RNA, 21 nt, Artificial Sequence
  Description of Artificial Sequence: Synthetic oligonucleotide
  misc_feature (20)..(21): nn is a deoxythymidine dinucleotide
uggugguccaugaaaaagcnn

SEQ ID NO: 1163 - RNA, 21 nt, Artificial Sequence
  Description of Artificial Sequence: Synthetic oligonucleotide
  misc_feature (20)..(21): nn is a deoxythymidine dinucleotide
ugguccaugaaaaagcagcnn

SEQ ID NO: 1164 - RNA, 21 nt, Artificial Sequence
  Description of Artificial Sequence: Synthetic oligonucleotide
  misc_feature (20)..(21): nn is a deoxythymidine dinucleotide
aaagcagaugacuugggccnn

SEQ ID NO: 1165 - RNA, 21 nt, Artificial Sequence
  Description of Artificial Sequence: Synthetic oligonucleotide
  misc_feature (20)..(21): nn is a deoxythymidine dinucleotide
gcagaugacuugggcaaacnn

SEQ ID NO: 1166 - RNA, 21 nt, Artificial Sequence
  Description of Artificial Sequence: Synthetic oligonucleotide
  misc_feature (20)..(21): nn is a deoxythymidine dinucleotide
augacuugggcaaaggugcnn

SEQ ID NO: 1167 - RNA, 21 nt, Artificial Sequence
  Description of Artificial Sequence: Synthetic oligonucleotide
  misc_feature (20)..(21): nn is a deoxythymidine dinucleotide
ugacuugggcaaagguggcnn

SEQ ID NO: 1168 - RNA, 21 nt, Artificial Sequence
  Description of Artificial Sequence: Synthetic oligonucleotide
  misc_feature (20)..(21): nn is a deoxythymidine dinucleotide
gacuugggcaaagguggacnn

SEQ ID NO: 1169 - RNA, 21 nt, Artificial Sequence
  Description of Artificial Sequence: Synthetic oligonucleotide
  misc_feature (20)..(21): nn is a deoxythymidine dinucleotide
guacaaagacaggaaacgcnn

SEQ ID NO: 1170 - RNA, 21 nt, Artificial Sequence
  Description of Artificial Sequence: Synthetic oligonucleotide
  misc_feature (20)..(21): nn is a deoxythymidine dinucleotide
acaaagacaggaaacgcucnn

SEQ ID NO: 1171 - RNA, 21 nt, Artificial Sequence
  Description of Artificial Sequence: Synthetic oligonucleotide
  misc_feature (20)..(21): nn is a deoxythymidine dinucleotide
caaagacaggaaacgcugcnn

SEQ ID NO: 1172 - RNA, 21 nt, Artificial Sequence
  Description of Artificial Sequence: Synthetic oligonucleotide
  misc_feature (20)..(21): nn is a deoxythymidine dinucleotide
aggaaacgcuggaagucgcnn

SEQ ID NO: 1173 - RNA, 21 nt, Artificial Sequence
  Description of Artificial Sequence: Synthetic oligonucleotide
  misc_feature (20)..(21): nn is a deoxythymidine dinucleotide
gucguuuggcuuguggugcnn

SEQ ID NO: 1174 - RNA, 21 nt, Artificial Sequence
  Description of Artificial Sequence: Synthetic oligonucleotide
  misc_feature (20)..(21): nn is a deoxythymidine dinucleotide
ucguuuggcuuguggugucnn

SEQ ID NO: 1175 - RNA, 21 nt, Artificial Sequence
  Description of Artificial Sequence: Synthetic oligonucleotide
  misc_feature (20)..(21): nn is a deoxythymidine dinucleotide
cguuuggcuugugguguacnn

SEQ ID NO: 1176 - RNA, 21 nt, Artificial Sequence
  Description of Artificial Sequence: Synthetic oligonucleotide
  misc_feature (20)..(21): nn is a deoxythymidine dinucleotide
guuuggcuugugguguaacnn

SEQ ID NO: 1177 - RNA, 21 nt, Artificial Sequence
  Description of Artificial Sequence: Synthetic oligonucleotide
  misc_feature (20)..(21): nn is a deoxythymidine dinucleotide
uuggcuugugguguaauucnn

SEQ ID NO: 1178 - RNA, 21 nt, Artificial Sequence
  Description of Artificial Sequence: Synthetic oligonucleotide
  misc_feature (20)..(21): nn is a deoxythymidine dinucleotide
ggcuugugguguaauuggcnn

SEQ ID NO: 1179 - RNA, 21 nt, Artificial Sequence
  Description of Artificial Sequence: Synthetic oligonucleotide
  misc_feature (20)..(21): nn is a deoxythymidine dinucleotide
gcuugugguguaauugggcnn

SEQ ID NO: 1180 - RNA, 21 nt, Artificial Sequence
  Description of Artificial Sequence: Synthetic oligonucleotide
  misc_feature (20)..(21): nn is a deoxythymidine dinucleotide
cuugugguguaauugggacnn

SEQ ID NO: 1181 - RNA, 21 nt, Artificial Sequence
  Description of Artificial Sequence: Synthetic oligonucleotide
  misc_feature (20)..(21): nn is a deoxythymidine dinucleotide
ugugguguaauugggauccnn

SEQ ID NO: 1182 - RNA, 21 nt, Artificial Sequence
  Description of Artificial Sequence: Synthetic oligonucleotide
  misc_feature (20)..(21): nn is a deoxythymidine dinucleotide
gugguguaauugggaucgcnn

SEQ ID NO: 1183 - RNA, 21 nt, Artificial Sequence
  Description of Artificial Sequence: Synthetic oligonucleotide
  misc_feature (20)..(21): n is a, c, g, or u
ugguguaauugggaucgccnn

SEQ ID NO: 1184 - RNA, 21 nt, Artificial Sequence
  Description of Artificial Sequence: Synthetic oligonucleotide
  misc_feature (20)..(21): nn is a deoxythymidine dinucleotide
guaauugggaucgcccaacnn

SEQ ID NO: 1185 - RNA, 21 nt, Artificial Sequence
  Description of Artificial Sequence: Synthetic oligonucleotide
  misc_feature (20)..(21): nn is a deoxythymidine dinucleotide
uaauugggaucgcccaaucnn

SEQ ID NO: 1186 - RNA, 21 nt, Artificial Sequence
  Description of Artificial Sequence: Synthetic oligonucleotide
  misc_feature (20)..(21): nn is a deoxythymidine dinucleotide
aauugggaucgcccaauacnn

SEQ ID NO: 1187 - RNA, 21 nt, Artificial Sequence
  Description of Artificial Sequence: Synthetic oligonucleotide
  misc_feature (20)..(21): nn is a deoxythymidine dinucleotide
auugggaucgcccaauaacnn

SEQ ID NO: 1188 - RNA, 21 nt, Artificial Sequence
  Description of Artificial Sequence: Synthetic oligonucleotide
  misc_feature (20)..(21): nn is a deoxythymidine dinucleotide
uugggaucgcccaauaaacnn

SEQ ID NO: 1189 - RNA, 21 nt, Artificial Sequence
  Description of Artificial Sequence: Synthetic oligonucleotide
  misc_feature (20)..(21): nn is a deoxythymidine dinucleotide
ugggaucgcccaauaaaccnn

SEQ ID NO: 1190 - RNA, 21 nt, Artificial Sequence
  Description of Artificial Sequence: Synthetic oligonucleotide
  misc_feature (20)..(21): nn is a deoxythymidine dinucleotide
gggaucgcccaauaaacacnn

SEQ ID NO: 1191 - RNA, 21 nt, Artificial Sequence
  Description of Artificial Sequence: Synthetic oligonucleotide
  misc_feature (20)..(21): nn is a deoxythymidine dinucleotide
aucgcccaauaaacauuccnn

SEQ ID NO: 1192 - RNA, 21 nt, Artificial Sequence
  Description of Artificial Sequence: Synthetic oligonucleotide
  misc_feature (20)..(21): nn is a deoxythymidine dinucleotide
ccaauaaacauucccuugcnn

SEQ ID NO: 1193 - RNA, 21 nt, Artificial Sequence
  Description of Artificial Sequence: Synthetic oligonucleotide
  misc_feature (20)..(21): nn is a deoxythymidine dinucleotide
caauaaacauucccuuggcnn

SEQ ID NO: 1194 - RNA, 21 nt, Artificial Sequence
  Description of Artificial Sequence: Synthetic oligonucleotide
  misc_feature (20)..(21): nn is a deoxythymidine dinucleotide
aauaaacauucccuuggacnn

SEQ ID NO: 1195 - RNA, 21 nt, Artificial Sequence
  Description of Artificial Sequence: Synthetic oligonucleotide
  misc_feature (20)..(21): nn is a deoxythymidine dinucleotide
auaaacauucccuuggaucnn

SEQ ID NO: 1196 - RNA, 21 nt, Artificial Sequence
  Description of Artificial Sequence: Synthetic oligonucleotide
  misc_feature (20)..(21): nn is a deoxythymidine dinucleotide
uaaacauucccuuggaugcnn

SEQ ID NO: 1197 - RNA, 21 nt, Artificial Sequence
  Description of Artificial Sequence: Synthetic oligonucleotide
  misc_feature (20)..(21): nn is a deoxythymidine dinucleotide
aaacauucccuuggaugucnn

SEQ ID NO: 1198 - RNA, 21 nt, Artificial Sequence
  Description of Artificial Sequence: Synthetic oligonucleotide
  misc_feature (20)..(21): nn is a deoxythymidine dinucleotide
aacauucccuuggauguacnn

SEQ ID NO: 1199 - RNA, 21 nt, Artificial Sequence
  Description of Artificial Sequence: Synthetic oligonucleotide
  misc_feature (20)..(21): nn is a deoxythymidine dinucleotide
auucccuuggauguaguccnn

SEQ ID NO: 1200 - RNA, 21 nt, Artificial Sequence
  Description of Artificial Sequence: Synthetic oligonucleotide
  misc_feature (20)..(21): nn is a deoxythymidine dinucleotide
cuuggauguagucugaggcnn

SEQ ID NO: 1201 - RNA, 21 nt, Artificial Sequence
  Description of Artificial Sequence: Synthetic oligonucleotide
  misc_feature (20)..(21): nn is a deoxythymidine dinucleotide
cugaggccccuuaacucacnn

SEQ ID NO: 1202 - RNA, 21 nt, Artificial Sequence
  Description of Artificial Sequence: Synthetic oligonucleotide
  misc_feature (20)..(21): nn is a deoxythymidine dinucleotide
gaggccccuuaacucauccnn

SEQ ID NO: 1203 - RNA, 21 nt, Artificial Sequence
  Description of Artificial Sequence: Synthetic oligonucleotide
  misc_feature (20)..(21): nn is a deoxythymidine dinucleotide
aggccccuuaacucaucucnn

SEQ ID NO: 1204 - RNA, 21 nt, Artificial Sequence
  Description of Artificial Sequence: Synthetic oligonucleotide
  misc_feature (20)..(21): nn is a deoxythymidine dinucleotide
ccccuuaacucaucuguucnn

SEQ ID NO: 1205 - RNA, 21 nt, Artificial Sequence
  Description of Artificial Sequence: Synthetic oligonucleotide
  misc_feature (20)..(21): nn is a deoxythymidine dinucleotide
cccuuaacucaucuguuacnn

SEQ ID NO: 1206 - RNA, 21 nt, Artificial Sequence
  Description of Artificial Sequence: Synthetic oligonucleotide
  misc_feature (20)..(21): nn is a deoxythymidine dinucleotide
ccuuaacucaucuguuaucnn

SEQ ID NO: 1207 - RNA, 21 nt, Artificial Sequence
  Description of Artificial Sequence: Synthetic oligonucleotide
  misc_feature (20)..(21): nn is a deoxythymidine dinucleotide
cuuaacucaucuguuauccnn

SEQ ID NO: 1208 - RNA, 21 nt, Artificial Sequence
  Description of Artificial Sequence: Synthetic oligonucleotide
  misc_feature (20)..(21): nn is a deoxythymidine dinucleotide
uuaacucaucuguuaucccnn

SEQ ID NO: 1209 - RNA, 21 nt, Artificial Sequence
  Description of Artificial Sequence: Synthetic oligonucleotide
  misc_feature (20)..(21): nn is a deoxythymidine dinucleotide
uaacucaucuguuauccucnn

SEQ ID NO: 1210 - RNA, 21 nt, Artificial Sequence
  Description of Artificial Sequence: Synthetic oligonucleotide
  misc_feature (20)..(21): nn is a deoxythymidine dinucleotide
aacucaucuguuauccugcnn

SEQ ID NO: 1211 - RNA, 21 nt, Artificial Sequence
  Description of Artificial Sequence: Synthetic oligonucleotide
  misc_feature (20)..(21): nn is a deoxythymidine dinucleotide
guuauccugcuagcuguacnn

SEQ ID NO: 1212 - RNA, 21 nt, Artificial Sequence
  Description of Artificial Sequence: Synthetic oligonucleotide
  misc_feature (20)..(21): nn is a deoxythymidine dinucleotide
cugcuagcuguagaaaugcnn

SEQ ID NO: 1213 - RNA, 21 nt, Artificial Sequence
  Description of Artificial Sequence: Synthetic oligonucleotide
  misc_feature (20)..(21): nn is a deoxythymidine dinucleotide
ugcuagcuguagaaaugucnn

SEQ ID NO: 1214 - RNA, 21 nt, Artificial Sequence
  Description of Artificial Sequence: Synthetic oligonucleotide
  misc_feature (20)..(21): nn is a deoxythymidine dinucleotide
gcuguagaaauguauccucnn

SEQ ID NO: 1215 - RNA, 21 nt, Artificial Sequence
  Description of Artificial Sequence: Synthetic oligonucleotide
  misc_feature (20)..(21): nn is a deoxythymidine dinucleotide
cuguagaaauguauccugcnn

SEQ ID NO: 1216 - RNA, 21 nt, Artificial Sequence
  Description of Artificial Sequence: Synthetic oligonucleotide
  misc_feature (20)..(21): nn is a deoxythymidine dinucleotide
uguagaaauguauccugacnn

SEQ ID NO: 1217 - RNA, 21 nt, Artificial Sequence
  Description of Artificial Sequence: Synthetic oligonucleotide
  misc_feature (20)..(21): nn is a deoxythymidine dinucleotide
guagaaauguauccugaucnn

SEQ ID NO: 1218 - RNA, 21 nt, Artificial Sequence
  Description of Artificial Sequence: Synthetic oligonucleotide
  misc_feature (20)..(21): nn is a deoxythymidine dinucleotide
aaauguauccugauaaaccnn

SEQ ID NO: 1219 - RNA, 21 nt, Artificial Sequence
  Description of Artificial Sequence: Synthetic oligonucleotide
  misc_feature (20)..(21): nn is a deoxythymidine dinucleotide
guauccugauaaacauuacnn

SEQ ID NO: 1220 - RNA, 21 nt, Artificial Sequence
  Description of Artificial Sequence: Synthetic oligonucleotide
  misc_feature (20)..(21): nn is a deoxythymidine dinucleotide
uuaaacacuguaaucuuacnn

SEQ ID NO: 1221 - RNA, 21 nt, Artificial Sequence
  Description of Artificial Sequence: Synthetic oligonucleotide
  misc_feature (20)..(21): nn is a deoxythymidine dinucleotide
acuguaaucuuaaaagugcnn

SEQ ID NO: 1222 - RNA, 21 nt, Artificial Sequence
  Description of Artificial Sequence: Synthetic oligonucleotide
  misc_feature (20)..(21): nn is a deoxythymidine dinucleotide
cuguaaucuuaaaagugucnn

SEQ ID NO: 1223 - RNA, 21 nt, Artificial Sequence
  Description of Artificial Sequence: Synthetic oligonucleotide
  misc_feature (20)..(21): nn is a deoxythymidine dinucleotide
uguaaucuuaaaaguguacnn

SEQ ID NO: 1224 - RNA, 21 nt, Artificial Sequence
  Description of Artificial Sequence: Synthetic oligonucleotide
  misc_feature (20)..(21): nn is a deoxythymidine dinucleotide
guaaucuuaaaaguguaacnn

SEQ ID NO: 1225 - RNA, 21 nt, Artificial Sequence
  Description of Artificial Sequence: Synthetic oligonucleotide
  misc_feature (20)..(21): nn is a deoxythymidine dinucleotide
cuuaaaaguguaauugugcnn

SEQ ID NO: 1226 - RNA, 21 nt, Artificial Sequence
  Description of Artificial Sequence: Synthetic oligonucleotide
  misc_feature (20)..(21): nn is a deoxythymidine dinucleotide
uaccuguagugagaaacucnn

SEQ ID NO: 1227 - RNA, 21 nt, Artificial Sequence
  Description of Artificial Sequence: Synthetic oligonucleotide
  misc_feature (20)..(21): nn is a deoxythymidine dinucleotide
uuaugaucacuuggaagacnn

SEQ ID NO: 1228 - RNA, 21 nt, Artificial Sequence
  Description of Artificial Sequence: Synthetic oligonucleotide
  misc_feature (20)..(21): nn is a deoxythymidine dinucleotide
augaucacuuggaagauucnn

SEQ ID NO: 1229 - RNA, 21 nt, Artificial Sequence
  Description of Artificial Sequence: Synthetic oligonucleotide
  misc_feature (20)..(21): nn is a deoxythymidine dinucleotide
aucacuuggaagauuugucnn

SEQ ID NO: 1230 - RNA, 21 nt, Artificial Sequence
  Description of Artificial Sequence: Synthetic oligonucleotide
  misc_feature (20)..(21): nn is a deoxythymidine dinucleotide
uggaagauuuguauaguucnn

SEQ ID NO: 1231 - RNA, 21 nt, Artificial Sequence
  Description of Artificial Sequence: Synthetic oligonucleotide
  misc_feature (20)..(21): nn is a deoxythymidine dinucleotide
uauaaaacucaguuaaaacnn

SEQ ID NO: 1232 - RNA, 21 nt, Artificial Sequence
  Description of Artificial Sequence: Synthetic oligonucleotide
  misc_feature (20)..(21): nn is a deoxythymidine dinucleotide
aaacucaguuaaaauguccnn

SEQ ID NO: 1233 - RNA, 21 nt, Artificial Sequence
  Description of Artificial Sequence: Synthetic oligonucleotide
  misc_feature (20)..(21): nn is a deoxythymidine dinucleotide
gucuguuucaaugaccugcnn

SEQ ID NO: 1234 - RNA, 21 nt, Artificial Sequence
  Description of Artificial Sequence: Synthetic oligonucleotide
  misc_feature (20)..(21): nn is a deoxythymidine dinucleotide
augaccuguauuuugccacnn

SEQ ID NO: 1235 - RNA, 21 nt, Artificial Sequence
  Description of Artificial Sequence: Synthetic oligonucleotide
  misc_feature (20)..(21): nn is a deoxythymidine dinucleotide
accuguauuuugccagaccnn

SEQ ID NO: 1236 - RNA, 21 nt, Artificial Sequence
  Description of Artificial Sequence: Synthetic oligonucleotide
  misc_feature (20)..(21): nn is a deoxythymidine dinucleotide
ccuguauuuugccagacucnn

SEQ ID NO: 1237 - RNA, 21 nt, Artificial Sequence
  Description of Artificial Sequence: Synthetic oligonucleotide
  misc_feature (20)..(21): nn is a deoxythymidine dinucleotide
uaaaucacagauggguaucnn

SEQ ID NO: 1238 - RNA, 21 nt, Artificial Sequence
  Description of Artificial Sequence: Synthetic oligonucleotide
  misc_feature (20)..(21): nn is a deoxythymidine dinucleotide
aucacagauggguauuaacnn

SEQ ID NO: 1239 - RNA, 21 nt, Artificial Sequence
  Description of Artificial Sequence: Synthetic oligonucleotide
  misc_feature (20)..(21): nn is a deoxythymidine dinucleotide
ucacagauggguauuaaacnn

SEQ ID NO: 1240 - RNA, 21 nt, Artificial Sequence
  Description of Artificial Sequence: Synthetic oligonucleotide
  misc_feature (20)..(21): nn is a deoxythymidine dinucleotide
acagauggguauuaaacucnn

SEQ ID NO: 1241 - RNA, 21 nt, Artificial Sequence
  Description of Artificial Sequence: Synthetic oligonucleotide
  misc_feature (20)..(21): nn is a deoxythymidine dinucleotide
cagauggguauuaaacuucnn

SEQ ID NO: 1242 - RNA, 21 nt, Artificial Sequence
  Description of Artificial Sequence: Synthetic oligonucleotide
  misc_feature (20)..(21): nn is a deoxythymidine dinucleotide
agauggguauuaaacuugcnn

SEQ ID NO: 1243 - RNA, 21 nt, Artificial Sequence
  Description of Artificial Sequence: Synthetic oligonucleotide
  misc_feature (20)..(21): nn is a deoxythymidine dinucleotide
auggguauuaaacuuguccnn

SEQ ID NO: 1244 - RNA, 21 nt, Artificial Sequence
  Description of Artificial Sequence: Synthetic oligonucleotide
  misc_feature (20)..(21): nn is a deoxythymidine dinucleotide
uaaacuugucagaauuuccnn

SEQ ID NO: 1245 - RNA, 21 nt, Artificial Sequence
  Description of Artificial Sequence: Synthetic oligonucleotide
  misc_feature (20)..(21): nn is a deoxythymidine dinucleotide
ucauucaagccugugaaucnn

SEQ ID NO: 1246 - RNA, 21 nt, Artificial Sequence
  Description of Artificial Sequence: Synthetic oligonucleotide
  misc_feature (20)..(21): nn is a deoxythymidine dinucleotide
cauucaagccugugaauacnn

SEQ ID NO: 1247 - RNA, 21 nt, Artificial Sequence
  Description of Artificial Sequence: Synthetic oligonucleotide
  misc_feature (20)..(21): nn is a deoxythymidine dinucleotide
aauaaaaacccuguauggcnn

SEQ ID NO: 1248 - RNA, 21 nt, Artificial Sequence
  Description of Artificial Sequence: Synthetic oligonucleotide
  misc_feature (20)..(21): nn is a deoxythymidine dinucleotide
auaaaaacccuguauggccnn

SEQ ID NO: 1249 - RNA, 21 nt, Artificial Sequence
  Description of Artificial Sequence: Synthetic oligonucleotide
  misc_feature (20)..(21): nn is a deoxythymidine dinucleotide
aacccuguauggcacuuacnn

SEQ ID NO: 1250 - RNA, 21 nt, Artificial Sequence
  Description of Artificial Sequence: Synthetic oligonucleotide
  misc_feature (20)..(21): nn is a deoxythymidine dinucleotide
acccuguauggcacuuaucnn

SEQ ID NO: 1251 - RNA, 21 nt, Artificial Sequence
  Description of Artificial Sequence: Synthetic oligonucleotide
  misc_feature (20)..(21): nn is a deoxythymidine dinucleotide
gaggcuauuaaaagaauccnn

SEQ ID NO: 1252 - RNA, 21 nt, Artificial Sequence
  Description of Artificial Sequence: Synthetic oligonucleotide
  misc_feature (20)..(21): nn is a deoxythymidine dinucleotide
aaagaauccaaauucaaacnn

SEQ ID NO: 1253 - RNA, 21 nt, Artificial Sequence
  Description of Artificial Sequence: Synthetic oligonucleotide
  misc_feature (20)..(21): nn is a deoxythymidine dinucleotide
gaauccaaauucaaacuacnn

SEQ ID NO: 1254 - DNA, 981 bp, Homo sapiens
gtttggggccagagtgggcgaggcgcggaggtctggcctataaagtagtcgcggagacggggtgctggtttgcgtcgtagtctcctgcagcgtctggggtttccgttgcagtcctcggaaccaggacctcggcgtggcctagcgagttatggcgacgaaggccgtgtgcgtgctgaagggcgacggcccagtgcagggcatcatcaatttcgagcagaaggaaagtaatggaccagtgaaggtgtggggaagcattaaaggactgactgaaggcctgcatggattccatgttcatgagtttggagataatacagcaggctgtaccagtgcaggtcctcactttaatcctctatccagaaaacacggtgggccaaaggatgaagagaggcatgttggagacttgggcaatgtgactgctgacaaagatggtgtggccgatgtgtctattgaagattctgtgatctcactctcaggagaccattgcatcattggccgcacactggtggtccatgaaaaagcagatgacttgggcaaaggtggaaatgaagaaagtacaaagacaggaaacgctggaagtcgtttggcttgtggtgtaattgggatcgcccaataaacattcccttggatgtagtctgaggccccttaactcatctgttatcctgctagctgtagaaatgtatcctgataaacattaaacactgtaatcttaaaagtgtaattgtgtgactttttcagagttgctttaaagtacctgtagtgagaaactgatttatgatcacttggaagatttgtatagttttataaaactcagttaaaatgtctgtttcaatgacctgtattttgccagacttaaatcacagatgggtattaaacttgtcagaatttctttgtcattcaagcctgtgaataaaaaccctgtatggcacttattatgaggctattaaaagaatccaaattcaaactaaaaaaaaaaaaaaaaaa

SEQ ID NO: 1255 - DNA, 54 bp, Artificial Sequence
  Description of Artificial Sequence: Synthetic oligonucleotide
gtgctgggcggggggcggcgggccctcccgcagaacaccatgcgctcttcggaa

SEQ ID NO: 1256 - DNA, 100 bp, Artificial Sequence
  Description of Artificial Sequence: Synthetic oligonucleotide
gaagcaaagaaggggcagagggagcccgtgagctgagtgggccagggactgggagaaggagtgaggaggcagggccggcatgcctctgctgctggccaga

SEQ ID NO: 1257 - DNA, 54 bp, Artificial Sequence
  Description of Artificial Sequence: Synthetic oligonucleotide
gtgctgggcggggggcggcgggccctcccgcagaacaccatgcgctccacggaa

SEQ ID NO: 1258 - DNA, 35 bp, Artificial Sequence
  Description of Artificial Sequence: Synthetic oligonucleotide
gggccctcccgcagaacaccatgcgctccacggaa

SEQ ID NO: 1259 - DNA, 30 bp, Artificial Sequence
  Description of Artificial Sequence: Synthetic oligonucleotide
ctcccgcagaacaccatgcgctccacggaa

SEQ ID NO: 1260 - DNA, 55 bp, Artificial Sequence
  Description of Artificial Sequence: Synthetic oligonucleotide
gtgctgggcggggggcggcgggccctcccgcagaacaccatgcgctccacggaag

SEQ ID NO: 1261 - DNA, 54 bp, Artificial Sequence
  Description of Artificial Sequence: Synthetic oligonucleotide
gtgctgggcggggggcggcgggccctcccgcagaacaccatgcgctcctcggaa

SEQ ID NO: 1262 - DNA, 50 bp, Artificial Sequence
  Description of Artificial Sequence: Synthetic oligonucleotide
tttatgcctcatcctctgagtgctgaaggcttgctgtaggctgtatgctg

SEQ ID NO: 1263 - DNA, 54 bp, Artificial Sequence
  Description of Artificial Sequence: Synthetic oligonucleotide
gtgctgggcggggggcggcgggccctcccgcagaacaccatgcgctcttcggga

SEQ ID NO: 1264 - DNA, 10 bp, Artificial Sequence
  Description of Artificial Sequence: Synthetic oligonucleotide
tgtgacctgg

SEQ ID NO: 1265 - DNA, 10 bp, Artificial Sequence
  Description of Artificial Sequence: Synthetic oligonucleotide
tgtgatttgg

SEQ ID NO: 1266 - DNA, 18 bp, Artificial Sequence
  Description of Artificial Sequence: Synthetic oligonucleotide
gtctgcacctgtcactag

SEQ ID NO: 1267 - DNA, 10 bp, Artificial Sequence
  Description of Artificial Sequence: Synthetic oligonucleotide
gtgacccaag

SEQ ID NO: 1268 - DNA, 15 bp, Artificial Sequence
  Description of Artificial Sequence: Synthetic oligonucleotide
gtggccactgagaag

SEQ ID NO: 1269 - DNA, 10 bp, Artificial Sequence
  Description of Artificial Sequence: Synthetic oligonucleotide
gtgacccaat

SEQ ID NO: 1270 - DNA, 10 bp, Artificial Sequence
  Description of Artificial Sequence: Synthetic oligonucleotide
gtgacccaac

SEQ ID NO: 1271 - DNA, 15 bp, Artificial Sequence
  Description of Artificial Sequence: Synthetic oligonucleotide
gtggccactgagaaa

SEQ ID NO: 1272 - DNA, 10 bp, Artificial Sequence
  Description of Artificial Sequence: Synthetic oligonucleotide
tataatttgg

SEQ ID NO: 1273 - DNA, 11 bp, Artificial Sequence
  Description of Artificial Sequence: Synthetic oligonucleotide
cctgacccagt

SEQ ID NO: 1274 - DNA, 52 bp, Artificial Sequence
  Description of Artificial Sequence: Synthetic oligonucleotide
ctgaggagcgccttgacagcagccatgggagggccgccccctacctcagtga

SEQ ID NO: 1275 - DNA, 52 bp, Artificial Sequence
  Description of Artificial Sequence: Synthetic oligonucleotide
ctgtggagcgccttgacagcagccatgggagggccgccccctacctcagtga

SEQ ID NO: 1276 - DNA, 100 bp, Artificial Sequence
  Description of Artificial Sequence: Synthetic oligonucleotide
tggccgtgtagtgctacccagcgctggctgcctcctcagcattgcaattcctctcccatctgggcaccagtcagctaccctggtgggaatctgggtagcc

SEQ ID NO: 1277 - DNA, 35 bp, Artificial Sequence
  Description of Artificial Sequence: Synthetic oligonucleotide
ctgaggagcgccttgacagcagccatgggagggcc

SEQ ID NO: 1278 - DNA, 52 bp, Artificial Sequence
  Description of Artificial Sequence: Synthetic oligonucleotide
ctgcggagcgccttgacagcagccatgggagggccgccccctacctcagtga

SEQ ID NO: 1279 - DNA, 50 bp, Artificial Sequence
  Description of Artificial Sequence: Synthetic oligonucleotide
agtgtatgatgcctgttactagcattcacatggaacaaattgctgccgtg

SEQ ID NO: 1280 - DNA, 54 bp, Artificial Sequence
  Description of Artificial Sequence: Synthetic oligonucleotide
tcctgaggagcgccttgacagcagccatgggagggccgccccctacctcagtga

SEQ ID NO: 1281 - DNA, 152 bp, Artificial Sequence
  Description of Artificial Sequence: Synthetic oligonucleotide
tttatgcctcatcctctgagtgctgaaggcttgctgtaggctgtatgctgcaatgtgactgctgacaaccctgtgacctggtttgtcagcagtcacattgttagtgtatgatgcctgttactagcattcacatggaacaaattgctgccgtg

SEQ ID NO: 1282 - DNA, 158 bp, Artificial Sequence
  Description of Artificial Sequence: Synthetic oligonucleotide
gtgctgggcggggggcggcgggccctcccgcagaacaccatgcgctcttcggaacaatgtgactgctgacaaccctgtgacctggtttgtcagcagtcacattgttctgaggagcgccttgacagcagccatgggagggccgccccctacctcagtga

SEQ ID NO: 1283 - DNA, 158 bp, Artificial Sequence
  Description of Artificial Sequence: Synthetic oligonucleotide
gtgctgggcggggggcggcgggccctcccgcagaacaccatgcgctcttcggaacaatgtgactgctgacaatcctgtgacctggtttgtcagcagtcacattgttctgaggagcgccttgacagcagccatgggagggccgccccctacctcagtga

SEQ ID NO: 1284 - DNA, 158 bp, Artificial Sequence
  Description of Artificial Sequence: Synthetic oligonucleotide
gtgctgggcggggggcggcgggccctcccgcagaacaccatgcgctcttcggaacaatgtgactgctgacaagcctgtgacctggtttgtcagcagtcacattgttctgaggagcgccttgacagcagccatgggagggccgccccctacctcagtga

SEQ ID NO: 1285 - DNA, 158 bp, Artificial Sequence
  Description of Artificial Sequence: Synthetic oligonucleotide
gtgctgggcggggggcggcgggccctcccgcagaacaccatgcgctcttcggaacaatgtgactgctgacaaacctgtgacctggtttgtcagcagtcacattgttctgaggagcgccttgacagcagccatgggagggccgccccctacctcagtga

SEQ ID NO: 1286 - DNA, 158 bp, Artificial Sequence
  Description of Artificial Sequence: Synthetic oligonucleotide
gtgctgggcggggggcggcgggccctcccgcagaacaccatgcgctcttcggaacaatgtgacagctgacaaacctgtgacctggtttgtcagcagtcacattgttctgaggagcgccttgacagcagccatgggagggccgccccctacctcagtga

SEQ ID NO: 1287 - DNA, 157 bp, Artificial Sequence
  Description of Artificial Sequence: Synthetic oligonucleotide
gtgctgggcggggggcggcgggccctcccgcagaacaccatgcgctcttcggaacaatgtgactgctgacaacctgtgacctggtttgtcagcagtcacattgttctgaggagcgccttgacagcagccatgggagggccgccccctacctcagtga

SEQ ID NO: 1288 - DNA, 159 bp, Artificial Sequence
  Description of Artificial Sequence: Synthetic oligonucleotide
gtgctgggcggggggcggcgggccctcccgcagaacaccatgcgctcttcggaacaatgtgactgctgacaatccctgtgacctggtttgtcagcagtcacattgttctgaggagcgccttgacagcagccatgggagggccgccccctacctcagtga

SEQ ID NO: 1289 - DNA, 158 bp, Artificial Sequence
  Description of Artificial Sequence: Synthetic oligonucleotide
gtgctgggcggggggcggcgggccctcccgcagaacaccatgcgctcttcggaacaatgtgactgctgacaaccctgtgatttggtttgtcagcagtcacattgttctgaggagcgccttgacagcagccatgggagggccgccccctacctcagtga

SEQ ID NO: 1290 - DNA, 158 bp, Artificial Sequence
  Description of Artificial Sequence: Synthetic oligonucleotide
gtgctgggcggggggcggcgggccctcccgcagaacaccatgcgctcttcggaacaatgtgactgctgacaaccctataatttggtttgtcagcagtcacattgttctgaggagcgccttgacagcagccatgggagggccgccccctacctcagtga

SEQ ID NO: 1291 - DNA, 159 bp, Artificial Sequence
  Description of Artificial Sequence: Synthetic oligonucleotide
gtgctgggcggggggcggcgggccctcccgcagaacaccatgcgctcttcggaacaatgtgactgctgacaacaccctgacccagttttgtcagcagtcacattgttctgaggagcgccttgacagcagccatgggagggccgccccctacctcagtga

SEQ ID NO: 1292 - DNA, 158 bp, Artificial Sequence
  Description of Artificial Sequence: Synthetic oligonucleotide
gtgctgggcggggggcggcgggccctcccgcagaacaccatgcgctcttcggaacaatgtgactgctgacaaccctgtgacctggtttgtcagcagtcacattgttctgtggagcgccttgacagcagccatgggagggccgccccctacctcagtga

SEQ ID NO: 1293 - DNA, 158 bp, Artificial Sequence
  Description of Artificial Sequence: Synthetic oligonucleotide
gtgctgggcggggggcggcgggccctcccgcagaacaccatgcgctcttcggaacaatgtgactgctgacaatcctgtgacctggtttgtcagcagtcacattgttctgtggagcgccttgacagcagccatgggagggccgccccctacctcagtga

SEQ ID NO: 1294 - DNA, 158 bp, Artificial Sequence
  Description of Artificial Sequence: Synthetic oligonucleotide
gtgctgggcggggggcggcgggccctcccgcagaacaccatgcgctcttcggaacaatgtgacagctgacaaacctgtgacctggtttgtcagcagtcacattgttctgtggagcgccttgacagcagccatgggagggccgccccctacctcagtga

SEQ ID NO: 1295 - DNA, 159 bp, Artificial Sequence
  Description of Artificial Sequence: Synthetic oligonucleotide
gtgctgggcggggggcggcgggccctcccgcagaacaccatgcgctcttcggaacaatgtgactgctgacaacaccctgacccagttttgtcagcagtcacattgttctgtggagcgccttgacagcagccatgggagggccgccccctacctcagtga

SEQ ID NO: 1296 - DNA, 158 bp, Artificial Sequence
  Description of Artificial Sequence: Synthetic oligonucleotide
gtgctgggcggggggcggcgggccctcccgcagaacaccatgcgctcttcggaacaatgtgactgctgacaagcctgtgacctggtttgtcagcagtcacattgttctgtggagcgccttgacagcagccatgggagggccgccccctacctcagtga

SEQ ID NO: 1297 - DNA, 158 bp, Artificial Sequence
  Description of Artificial Sequence: Synthetic oligonucleotide
gtgctgggcggggggcggcgggccctcccgcagaacaccatgcgctcttcggaacgacgaaggccgtgtgcgccctgtgacctggtcgcacacggccttcgtcgttctgaggagcgccttgacagcagccatgggagggccgccccctacctcagtga

SEQ ID NO: 1298 - DNA, 158 bp, Artificial Sequence
  Description of Artificial Sequence: Synthetic oligonucleotide
gtgctgggcggggggcggcgggccctcccgcagaacaccatgcgctcttcggaatgacttgggcaaaggtggccctgtgacctggtccacctttgcccaagtcattctgaggagcgccttgacagcagccatgggagggccgccccctacctcagtga

SEQ ID NO: 1299 - DNA, 158 bp, Artificial Sequence
  Description of Artificial Sequence: Synthetic oligonucleotide
gtgctgggcggggggcggcgggccctcccgcagaacaccatgcgctcttcggaaaactcatctgttatcctgccctgtgacctggtcaggataacagatgagttttctgaggagcgccttgacagcagccatgggagggccgccccctacctcagtga

SEQ ID NO: 1300 - DNA, 260 bp, Artificial Sequence
  Description of Artificial Sequence: Synthetic oligonucleotide
gaagcaaagaaggggcagagggagcccgtgagctgagtgggccagggactgggagaaggagtgaggaggcagggccggcatgcctctgctgctggccagacaatgtgactgctgacaacccgtctgcacctgtcactagtttgtcagcagtcacattgtttggccgtgtagtgctacccagcgctggctgcctcctcagcattgcaattcctctcccatctgggcaccagtcagctaccctggtgggaatctgggtagcc

SEQ ID NO: 1301 - DNA, 158 bp, Artificial Sequence
  Description of Artificial Sequence: Synthetic oligonucleotide
gtgctgggcggggggcggcgggccctcccgcagaacaccatgcgctcttcggaaccccttaactcatctgttccctgtgacctggtaacagatgagttaaggggttctgaggagcgccttgacagcagccatgggagggccgccccctacctcagtga

SEQ ID NO: 1302 - DNA, 158 bp, Artificial Sequence
  Description of Artificial Sequence: Synthetic oligonucleotide
gtgctgggcggggggcggcgggccctcccgcagaacaccatgcgctcttcggaacccttaactcatctgttaccctgtgacctggttaacagatgagttaagggttctgaggagcgccttgacagcagccatgggagggccgccccctacctcagtga

SEQ ID NO: 1303 - DNA, 158 bp, Artificial Sequence
  Description of Artificial Sequence: Synthetic oligonucleotide
gtgctgggcggggggcggcgggccctcccgcagaacaccatgcgctcttcggaaaactcatctgttatcttgccctgtgacctggtcaggataacagatgagttttctgaggagcgccttgacagcagccatgggagggccgccccctacctcagtga

SEQ ID NO: 1304 - DNA, 158 bp, Artificial Sequence
  Description of Artificial Sequence: Synthetic oligonucleotide
gtgctgggcggggggcggcgggccctcccgcagaacaccatgcgctcttcggaagctgtggaaatgtatcttccctgtgacctggtaggatacatttctacagcttctgaggagcgccttgacagcagccatgggagggccgccccctacctcagtga

SEQ ID NO: 1305 - DNA, 158 bp, Artificial Sequence
  Description of Artificial Sequence: Synthetic oligonucleotide
gtgctgggcggggggcggcgggccctcccgcagaacaccatgcgctcttcggaatgacttgggcaaaggtgagcctgtgacctggtccacctttgcccaagtcattctgaggagcgccttgacagcagccatgggagggccgccccctacctcagtga

SEQ ID NO: 1306 - DNA, 158 bp, Artificial Sequence
  Description of Artificial Sequence: Synthetic oligonucleotide
gtgctgggcggggggcggcgggccctcccgcagaacaccatgcgctcttcggaaccccttaactcatctgttgcctgtgacctggtaacagatgagttaaggggttctgaggagcgccttgacagcagccatgggagggccgccccctacctcagtga

SEQ ID NO: 1307 - DNA, 158 bp, Artificial Sequence
  Description of Artificial Sequence: Synthetic oligonucleotide
gtgctgggcggggggcggcgggccctcccgcagaacaccatgcgctcttcggaacccttaactcatctgttagcctgtgacctggttaacagatgagttaagggttctgaggagcgccttgacagcagccatgggagggccgccccctacctcagtga

SEQ ID NO: 1308 - DNA, 158 bp, Artificial Sequence
  Description of Artificial Sequence: Synthetic oligonucleotide
gtgctgggcggggggcggcgggccctcccgcagaacaccatgcgctcttcggaaaactcatctgttatcttagcctgtgacctggtcaggataacagatgagttttctgaggagcgccttgacagcagccatgggagggccgccccctacctcagtga

SEQ ID NO: 1309 - DNA, 158 bp, Artificial Sequence
  Description of Artificial Sequence: Synthetic oligonucleotide
gtgctgggcggggggcggcgggccctcccgcagaacaccatgcgctcttcggaagctgtggaaatgtatcttgcctgtgacctggtaggatacatttctacagcttctgaggagcgccttgacagcagccatgggagggccgccccctacctcagtga

SEQ ID NO: 1310 - DNA, 158 bp, Artificial Sequence
  Description of Artificial Sequence: Synthetic oligonucleotide
gtgctgggcggggggcggcgggccctcccgcagaacaccatgcgctcttcggaatgacttgggcaaaggtaggcctgtgacctggtccacctttgcccaagtcattctgaggagcgccttgacagcagccatgggagggccgccccctacctcagtga

SEQ ID NO: 1311 - DNA, 158 bp, Artificial Sequence
  Description of Artificial Sequence: Synthetic oligonucleotide
gtgctgggcggggggcggcgggccctcccgcagaacaccatgcgctcttcggaaccccttaactcatctgttccctgtgatttggtaacagatgagttaaggggttctgaggagcgccttgacagcagccatgggagggccgccccctacctcagtga

SEQ ID NO: 1312 - DNA, 158 bp, Artificial Sequence
  Description of Artificial Sequence: Synthetic oligonucleotide
gtgctgggcggggggcggcgggccctcccgcagaacaccatgcgctcttcggaacccttaactcatctgttaccctgtgatttggttaacagatgagttaagggttctgaggagcgccttgacagcagccatgggagggccgccccctacctcagtga

SEQ ID NO: 1313 - DNA, 158 bp, Artificial Sequence
  Description of Artificial Sequence: Synthetic oligonucleotide
gtgctgggcggggggcggcgggccctcccgcagaacaccatgcgctcttcggaaaactcatctgttatcttgccctgtgatttggtcaggataacagatgagttttctgaggagcgccttgacagcagccatgggagggccgccccctacctcagtga

SEQ ID NO: 1314 - DNA, 158 bp, Artificial Sequence
  Description of Artificial Sequence: Synthetic oligonucleotide
gtgctgggcggggggcggcgggccctcccgcagaacaccatgcgctcttcggaagctgtggaaatgtatcttccctgtgatttggtaggatacatttctacagcttctgaggagcgccttgacagcagccatgggagggccgccccctacctcagtga

SEQ ID NO: 1315 - DNA, 158 bp, Artificial Sequence
  Description of Artificial Sequence: Synthetic oligonucleotide
gtgctgggcggggggcggcgggccctcccgcagaacaccatgcgctcttcggaatgacttgggcaaaggtgagcctgtgatttggtccacctttgcccaagtcattctgaggagcgccttgacagcagccatgggagggccgccccctacctcagtga

SEQ ID NO: 1316 - DNA, 158 bp, Artificial Sequence
  Description of Artificial Sequence: Synthetic oligonucleotide
gtgctgggcggggggcggcgggccctcccgcagaacaccatgcgctcttcggaaccccttaacacatctgttacctgtgacctggtaacagatgagttaaggggttctgtggagcgccttgacagcagccatgggagggccgccccctacctcagtga

SEQ ID NO: 1317 - DNA, 158 bp, Artificial Sequence
  Description of Artificial Sequence: Synthetic oligonucleotide
gtgctgggcggggggcggcgggccctcccgcagaacaccatgcgctcttcggaacccttaactgatctgttaacctgtgacctggttaacagatgagttaagggttctgtggagcgccttgacagcagccatgggagggccgccccctacctcagtga

SEQ ID NO: 1318 - DNA, 158 bp, Artificial Sequence
  Description of Artificial Sequence: Synthetic oligonucleotide
gtgctgggcggggggcggcgggccctcccgcagaacaccatgcgctcttcggaaaactcatctcttatcttgccctgtgacctggtcaggataacagatgagttttctgtggagcgccttgacagcagccatgggagggccgccccctacctcagtga

SEQ ID NO: 1319 - DNA, 158 bp, Artificial Sequence
  Description of Artificial Sequence: Synthetic oligonucleotide
gtgctgggcggggggcggcgggccctcccgcagaacaccatgcgctcttcggaagctgtggaattgtatcttgcctgtgacctggtaggatacatttctacagcttctgtggagcgccttgacagcagccatgggagggccgccccctacctcagtga

SEQ ID NO: 1320 - DNA, 158 bp, Artificial Sequence
  Description of Artificial Sequence: Synthetic oligonucleotide
gtgctgggcggggggcggcgggccctcccgcagaacaccatgcgctcttcggaatgacttggggaaaggtgagcctgtgacctggtccacctttgcccaagtcattctgtggagcgccttgacagcagccatgggagggccgccccctacctcagtga

SEQ ID NO: 1321 - DNA, 158 bp, Artificial Sequence
  Description of Artificial Sequence: Synthetic oligonucleotide
gtgctgggcggggggcggcgggccctcccgcagaacaccatgcgctcttcggaaccccttaactcatctgttgcctgtgacctggtaacagatgagttaaggggttctgtggagcgccttgacagcagccatgggagggccgccccctacctcagtga

SEQ ID NO: 1322 - DNA, 158 bp, Artificial Sequence
  Description of Artificial Sequence: Synthetic oligonucleotide
gtgctgggcggggggcggcgggccctcccgcagaacaccatgcgctcttcggaacccttaactcatctgttagcctgtgacctggttaacagatgagttaagggttctgtggagcgccttgacagcagccatgggagggccgccccctacctcagtga

SEQ ID NO: 1323 - DNA, 158 bp, Artificial Sequence
  Description of Artificial Sequence: Synthetic oligonucleotide
gtgctgggcggggggcggcgggccctcccgcagaacaccatgcgctcttcggaaaactcatctgttatcttggcctgtgacctggtcaggataacagatgagttttctgtggagcgccttgacagcagccatgggagggccgccccctacctcagtga

SEQ ID NO: 1324 - DNA, 158 bp, Artificial Sequence
  Description of Artificial Sequence: Synthetic oligonucleotide
gtgctgggcggggggcggcgggccctcccgcagaacaccatgcgctcttcggaagctgtggaaatgtatcttgcctgtgacctggtaggatacatttctacagcttctgtggagcgccttgacagcagccatgggagggccgccccctacctcagtga

SEQ ID NO: 1325 - DNA, 158 bp, Artificial Sequence
  Description of Artificial Sequence: Synthetic oligonucleotide
gtgctgggcggggggcggcgggccctcccgcagaacaccatgcgctcttcggaatgacttgggcaaaggtaggcctgtgacctggtccacctttgcccaagtcattctgtggagcgccttgacagcagccatgggagggccgccccctacctcagtga

SEQ ID NO: 1326 - DNA, 260 bp, Artificial Sequence
  Description of Artificial Sequence: Synthetic oligonucleotide
gaagcaaagaaggggcagagggagcccgtgagctgagtgggccagggactgggagaaggagtgaggaggcagggccggcatgcctctgctgctggccagaccccttaactcatttgttcccgtctgcacctgtcactagtaacagatgagttaaggggtttggccgtgtagtgctacccagcgctggctgcctcctcagcattgcaattcctctcccatctgggcaccagtcagctaccctggtgggaatctgggtagcc

SEQ ID NO: 1327 - DNA, 260 bp, Artificial Sequence
  Description of Artificial Sequence: Synthetic oligonucleotide
gaagcaaagaaggggcagagggagcccgtgagctgagtgggccagggactgggagaaggagtgaggaggcagggccggcatgcctctgctgctggccagacccttaactcatctgttacccgtctgcacctgtcactagttaacagatgagttaagggtttggccgtgtagtgctacccagcgctggctgcctcctcagcattgcaattcctctcccatctgggcaccagtcagctaccctggtgggaatctgggtagcc

SEQ ID NO: 1328 - DNA, 260 bp, Artificial Sequence
  Description of Artificial Sequence: Synthetic oligonucleotide
gaagcaaagaaggggcagagggagcccgtgagctgagtgggccagggactgggagaaggagtgaggaggcagggccggcatgcctctgctgctggccagaaactcatctgttatcttgcccgtctgcacctgtcactagtcaggataacagatgagtttttggccgtgtagtgctacccagcgctggctgcctcctcagcattgcaattcctctcccatctgggcaccagtcagctaccctggtgggaatctgggtagcc

SEQ ID NO: 1329 - DNA, 260 bp, Artificial Sequence
  Description of Artificial Sequence: Synthetic oligonucleotide
gaagcaaagaaggggcagagggagcccgtgagctgagtgggccagggactgggagaaggagtgaggaggcagggccggcatgcctctgctgctggccagagctgtggaaatgtatcttcccgtctgcacctgtcactagtaggatacatttctacagctttggccgtgtagtgctacccagcgctggctgcctcctcagcattgcaattcctctcccatctgggcaccagtcagctaccctggtgggaatctgggtagcc

SEQ ID NO: 1330 - DNA, 260 bp, Artificial Sequence
  Description of Artificial Sequence: Synthetic oligonucleotide
gaagcaaagaaggggcagagggagcccgtgagctgagtgggccagggactgggagaaggagtgaggaggcagggccggcatgcctctgctgctggccagatgacttgggcaaaggtagcccgtctgcacctgtcactagtccacctttgcccaagtcatttggccgtgtagtgctacccagcgctggctgcctcctcagcattgcaattcctctcccatctgggcaccagtcagctaccctggtgggaatctgggtagcc

SEQ ID NO: 1331 - DNA, 21 bp, Artificial Sequence
  Description of Artificial Sequence: Synthetic oligonucleotide
caatgtgactgctgacaaccc

SEQ ID NO: 1332 - DNA, 21 bp, Artificial Sequence
  Description of Artificial Sequence: Synthetic oligonucleotide
tttgtcagcagtcacattgtt

SEQ ID NO: 1333 - DNA, 21 bp, Artificial Sequence
  Description of Artificial Sequence: Synthetic oligonucleotide
caatgtgactgctgacaatcc

SEQ ID NO: 1334 - DNA, 21 bp, Artificial Sequence
  Description of Artificial Sequence: Synthetic oligonucleotide
caatgtgactgctgacaagcc

SEQ ID NO: 1335 - DNA, 21 bp, Artificial Sequence
  Description of Artificial Sequence: Synthetic oligonucleotide
caatgtgactgctgacaaacc

SEQ ID NO: 1336 - DNA, 21 bp, Artificial Sequence
  Description of Artificial Sequence: Synthetic oligonucleotide
caatgtgacagctgacaaacc

SEQ ID NO: 1337 - DNA, 20 bp, Artificial Sequence
  Description of Artificial Sequence: Synthetic oligonucleotide
caatgtgactgctgacaacc

SEQ ID NO: 1338 - DNA, 21 bp, Artificial Sequence
  Description of Artificial Sequence: Synthetic oligonucleotide
caatgtgactgctgacaacac

SEQ ID NO: 1339 - DNA, 22 bp, Artificial Sequence
  Description of Artificial Sequence: Synthetic oligonucleotide
caatgtgactgctgacaatccc

SEQ ID NO: 1340 - DNA, 21 bp, Artificial Sequence
  Description of Artificial Sequence: Synthetic oligonucleotide
cgacgaaggccgtgtgcgccc

SEQ ID NO: 1341 - DNA, 21 bp, Artificial Sequence
  Description of Artificial Sequence: Synthetic oligonucleotide
tcgcacacggccttcgtcgtt

SEQ ID NO: 1342 - DNA, 21 bp, Artificial Sequence
  Description of Artificial Sequence: Synthetic oligonucleotide
tgacttgggcaaaggtggccc

SEQ ID NO: 1343 - DNA, 21 bp, Artificial Sequence
  Description of Artificial Sequence: Synthetic oligonucleotide
tccacctttgcccaagtcatt

SEQ ID NO: 1344 - DNA, 21 bp, Artificial Sequence
  Description of Artificial Sequence: Synthetic oligonucleotide
aactcatctgttatcctgccc

SEQ ID NO: 1345 - DNA, 21 bp, Artificial Sequence
  Description of Artificial Sequence: Synthetic oligonucleotide
tcaggataacagatgagtttt

SEQ ID NO: 1346 - DNA, 21 bp, Artificial Sequence
  Description of Artificial Sequence: Synthetic oligonucleotide
ccccttaactcatctgttccc

SEQ ID NO: 1347 - DNA, 21 bp, Artificial Sequence
  Description of Artificial Sequence: Synthetic oligonucleotide
taacagatgagttaaggggtt

SEQ ID NO: 1348 - DNA, 21 bp, Artificial Sequence
  Description of Artificial Sequence: Synthetic oligonucleotide
cccttaactcatctgttaccc

SEQ ID NO: 1349 - DNA, 21 bp, Artificial Sequence
  Description of Artificial Sequence: Synthetic oligonucleotide
ttaacagatgagttaagggtt

SEQ ID NO: 1350 - DNA, 21 bp, Artificial Sequence
  Description of Artificial Sequence: Synthetic oligonucleotide
aactcatctgttatcttgccc

SEQ ID NO: 1351 - DNA, 21 bp, Artificial Sequence
  Description of Artificial Sequence: Synthetic oligonucleotide
gctgtggaaatgtatcttccc

SEQ ID NO: 1352 - DNA, 21 bp, Artificial Sequence
  Description of Artificial Sequence: Synthetic oligonucleotide
taggatacatttctacagctt

SEQ ID NO: 1353 - DNA, 21 bp, Artificial Sequence
  Description of Artificial Sequence: Synthetic oligonucleotide
tgacttgggcaaaggtgagcc

SEQ ID NO: 1354 - DNA, 21 bp, Artificial Sequence
  Description of Artificial Sequence: Synthetic oligonucleotide
ccccttaactcatctgttgcc

SEQ ID NO: 1355 - DNA, 21 bp, Artificial Sequence
  Description of Artificial Sequence: Synthetic oligonucleotide
cccttaactcatctgttagcc

SEQ ID NO: 1356 - DNA, 21 bp, Artificial Sequence
  Description of Artificial Sequence: Synthetic oligonucleotide
aactcatctgttatcttagcc

SEQ ID NO: 1357 - DNA, 21 bp, Artificial Sequence
  Description of Artificial Sequence: Synthetic oligonucleotide
gctgtggaaatgtatcttgcc

SEQ ID NO: 1358 - DNA, 21 bp, Artificial Sequence
  Description of Artificial Sequence: Synthetic oligonucleotide
tgacttgggcaaaggtaggcc

SEQ ID NO: 1359 - DNA, 21 bp, Artificial Sequence
  Description of Artificial Sequence: Synthetic oligonucleotide
ccccttaacacatctgttacc

SEQ ID NO: 1360 - DNA, 21 bp, Artificial Sequence
  Description of Artificial Sequence: Synthetic oligonucleotide
cccttaactgatctgttaacc

SEQ ID NO: 1361 - DNA, 21 bp, Artificial Sequence
  Description of Artificial Sequence: Synthetic oligonucleotide
aactcatctcttatcttgccc

SEQ ID NO: 1362 - DNA, 21 bp, Artificial Sequence
  Description of Artificial Sequence: Synthetic oligonucleotide
gctgtggaattgtatcttgcc

SEQ ID NO: 1363 - DNA, 21 bp, Artificial Sequence
  Description of Artificial Sequence: Synthetic oligonucleotide
tgacttggggaaaggtgagcc

SEQ ID NO: 1364 - DNA, 21 bp, Artificial Sequence
  Description of Artificial Sequence: Synthetic oligonucleotide
aactcatctgttatcttggcc

SEQ ID NO: 1365 - DNA, 21 bp, Artificial Sequence
  Description of Artificial Sequence: Synthetic oligonucleotide
ccccttaactcatttgttccc

SEQ ID NO: 1366 - DNA, 21 bp, Artificial Sequence
  Description of Artificial Sequence: Synthetic oligonucleotide
tgacttgggcaaaggtagccc

SEQ ID NO: 1367 - DNA, 158 bp, Artificial Sequence
  Description of Artificial Sequence: Synthetic oligonucleotide
gtgctgggcggggggcggcgggccctcccgcagaacaccatgcgctcttcgggatttgtcagcagtcacattgtctgtgacctggcaatgtgactgctgacaaatcctgaggagcgccttgacagcagccatgggagggccgccccctacctcagtga

SEQ ID NO: 1368 - DNA, 21 bp, Artificial Sequence
  Description of Artificial Sequence: Synthetic oligonucleotide
tttgtcagcagtcacattgtc

SEQ ID NO: 1369 - DNA, 19 bp, Artificial Sequence
  Description of Artificial Sequence: Synthetic oligonucleotide
caatgtgactgctgacaaa

SEQ ID NO: 1370 - DNA, 141 bp, Artificial Sequence
  Description of Artificial Sequence: Synthetic oligonucleotide
cctgcaggcagctgcgcgctcgctcgctcactgaggccgcccgggcaaagcccgggcgtcgggcgacctttggtcgcccggcctcagtgagcgagcgagcgcgcagagagggagtggccaactccatcactaggggttcct

SEQ ID NO: 1371 - DNA, 105 bp, Artificial Sequence
  Description of Artificial Sequence: Synthetic oligonucleotide
ctgcgcgctcgctcgctcactgaggccgcccgggcaaagcccgggcgtcgggcgacctttggtcgcccggcctcagtgagcgagcgagcgcgcagagagggagtg

SEQ ID NO: 1372 - DNA, 141 bp, Artificial Sequence
  Description of Artificial Sequence: Synthetic oligonucleotide
aggaacccctagtgatggagttggccactccctctctgcgcgctcgctcgctcactgaggccgggcgaccaaaggtcgcccgacgcccgggctttgcccgggcggcctcagtgagcgagcgagcgcgcagctgcctgcagg

SEQ ID NO: 1373 - DNA, 130 bp, Artificial Sequence
  Description of Artificial Sequence: Synthetic oligonucleotide
aggaacccctagtgatggagttggccactccctctctgcgcgctcgctcgctcactgaggccgggcgaccaaaggtcgcccgacgcccgggctttgcccgggcggcctcagtgagcgagcgagcgcgcag

SEQ ID NO: 1374 - DNA, 10 bp, Artificial Sequence
  Description of Artificial Sequence: Synthetic oligonucleotide
gtcgacataa

SEQ ID NO: 1375 - DNA, 121 bp, Artificial Sequence
  Description of Artificial Sequence: Synthetic oligonucleotide
gtcgacataacgcgtaattcgcccttgggcctaggcaattggatccgccggcagagaaaacatcccagggatttacagatcacatgcaggcagggaccagctcaacccttctacgcgtata

SEQ ID NO: 1376 - DNA, 73 bp, Artificial Sequence
  Description of Artificial Sequence: Synthetic oligonucleotide
gtcgacataacgcgtaattcgcccttgggcctaggcaattggatccgccggcagagaaaacatcacgcgtata

SEQ ID NO: 1377 - DNA, 18 bp, Artificial Sequence
  Description of Artificial Sequence: Synthetic oligonucleotide
gtcgacataacgcgtata

SEQ ID NO: 1378 - DNA, 14 bp, Artificial Sequence
  Description of Artificial Sequence: Synthetic oligonucleotide
ctcgagagatctac

SEQ ID NO: 1379 - DNA, 3013 bp, Artificial Sequence
  Description of Artificial Sequence: Synthetic oligonucleotide
aattcgcccttgggcctaggcaattggatccgccggcagagaaaacatcccagggatttacagatcacatgcaggcagggaccagctcaacccttctttaatgtcatccagggagggggccagggatggaggggaggggttgaggagcgagaggcagttatttttgggtgggattcaccacttttcccatgaagaggggagacttggtattttgttcaatcattaagaagacaaagggtttgttgaacttgacctcgggggggatagacatgggtatggcctctaaaaacatggccccagcagcttcagtccctttctcgtcgatggtcagcacagccttatgcacggcctggaggggagagaagcagagacacgttgtaaggctgatcccaggcctcgagcaaggctcacgtggacacctcccaggaagcgctcactccccctggacggccctggccctgcacatcctctccctccctgtcacataggccttgctcctcctcaaggctttggctgatggggctggctcccctctgtccatcttcctgacaagcgcctctccccctgctcaggtgcacccacaactcagaacagggaagagcatcgtcactccacgtctgcctccagggctctctcctttctagtacacggcttgaagctccttgaggacacggaccctggcagtgaccttcacagtgcccagaccccaagataatgcagccattcatggaactgcaggttgttcattggtcgcctttagttttccaaaataagtgtcactttagctgaaatcattcattaattcagacaccaaatctcacagatcgaaggagtcagaaattcctttgaaacaacttagcccaaacctttctgtgtcagtatggataaatcaaggcccaatgtctagaaggtcttgggcaaagttgaaattcagggtcagtgacacaacctcaagggaggccccgaaagtgccagctgcacagcagcccctgcctggctttgctgtttgcccaccgtcccgtgtcagtgaatcacgggcatcttcaggagctcagcctgggtcttcatttgtttccctcggccccttcctcagcctcaggacagtgctgcagcccccacacattcttccctacagataccatggtgcaacaaggtcgtcagggtgatctcaccttggagagcttcaggggtgcctcctctgtgaccccggagaggtcagccccattgctgaagaccttagtgatgcccagttgacccaggacgctcttcagatcataggttccagtaatggacagtttgggtaaatgtaagctggcagacctgtcgtgcagaaaagaaattcaaggcatggcacagcattcctcttgttcttctgggacccaccacagtgcaagtgttttcttttctgattatttctgccacttactcctgtgtcctccacccacactaagatgggaactcggctttggtttgttctacttttagctcttctacattgagtcaaagaatgttaacatcgaatgaatcacaaaagcttgaaatgccacctcctctgatattctaggtgtcctggaagcctgtctcatcttgccctgtagtgttgggtcacctggcccccagcctgtaacatccccagggccctacacccagagaaacacggggctggtggcagtgcccagtgacaaccgtttagtggataagagaagagtgaccacaccaggctgagtgctcctctctggttttccatggggagacaatgccaccctgagcagggtctggtgtgagcggcagctggctctgggctctctgatccgttaccctctcagcctctttgttctttctcaacccctggagcagagacctcaggaggtgctggcatggaacagagaaattccagcctcgattcctattatgaacccgacaccttttgtattttcatcttggttttacagtgtacaaaacgaactagatcagcagggcatgggcataatcacgaatgcacacacatacactaatgtgtggctcatgtttaagtatcacttactacaggacacccaatctaacagcaccgataaagtgacagagaaacgcaagccttctgcgaacatggcctggctgttccaattccgaaccttgcttttctgggccttgccacacaggctcttcccccgtccccccagggacattctacccttgaactccacactccactgctgcctttgccaggaagcccatctgttcctttttggttctgccagaacgtgtggtggtgctgctgtccctgccttgggcactggatattgggaagggacagtgtccacactggagtgggaagttcccagggacgagacctttacctcctcaccctgggtactgttctcctcatggagcatggacggcgctgcctgaactcagtggtggcctcattctggaagccaagtttatacagagtagcagtgacccagggatgtggggttcaccctcctcagccctctggccagtcctgatgggcctcagtcccaacatggctaagaggtgtgggcagcttcttggtcaccctcaggttggggaatcaccttctgtcttcattttccaggaacttggtgatgatatcgtgggtgagttcatttaccaggtgctgtagtttcccctcatcaggcaggaagaagatggcggtggcattgcccaggtatttcatcagcagcacccagctggacagcttcttacagtgctggatgttaaacatgcctaaacgcttcatcataggcaccttcacggtggtcacctggtccacgtggaagtcctcttcctcggtgtccttgacttcaaagggtctctcccatttgcctggagagaggggaaggtgggcatcaccaggggtgagtgaaggtttggaagagtgtagcagaataagaaaccatgagtcccctccctgagaagccctgagcccccttgacgacacacatccctcgaggctcagcttcatcatctgtaaaaggtgctgaaactgacc

SEQ ID NO: 1380 - DNA, 712 bp, Artificial Sequence
  Description of Artificial Sequence: Synthetic oligonucleotide
aattcgcccttgggcctaggcaattggatccgccggcagagaaaacatcccagggatttacagatcacatgcaggcagggaccagctcaacccttctttaatgtcatccagggagggggccagggatggaggggaggggttgaggagcgagaggcagttatttttgggtgggattcaccacttttcccatgaagaggggagacttggtattttgttcaatcattaagaagacaaagggtttgttgaacttgacctcgggggggatagacatgggtatggcctctaaaaacatggccccagcagcttcagtccctttctcgtcgatggtcagcacagccttatgcacggcctggaggggagagaagcagagacacgttgtaaggctgatcccaggcctcgagcaaggctcacgtggacacctcccaggaagcgctcactccccctggacggccctggccctgcacatcctctccctccctgtcacataggccttgctcctcctcaaggctttggctgatggggctggctcccctctgtccatcttcctgacaagcgcctctccccctgctcaggtgcacccacaactcagaacagggaagagcatcgtcactccacgtctgcctccagggctctctcctttctagtacacggcttgaagctccttgaggacacggaccctggcagtgaccttcacagtgcccagaccacgcgt

SEQ ID NO: 1381 - DNA, 2405 bp, Artificial Sequence
  Description of Artificial Sequence: Synthetic oligonucleotide
aattcgcccttgggcctaggcaattggatccgccggcagagaaaacatcccagggatttacagatcacatgcaggcagggaccagctcaacccttctttaatgtcatccagggagggggccagggatggaggggaggggttgaggagcgagaggcagttatttttgggtgggattcaccacttttcccatgaagaggggagacttggtattttgttcaatcattaagaagacaaagggtttgttgaacttgacctcgggggggatagacatgggtatggcctctaaaaacatggccccagcagcttcagtccctttctcgtcgatggtcagcacagccttatgcacggcctggaggggagagaagcagagacacgttgtaaggctgatcccaggcctcgagcaaggctcacgtggacacctcccaggaagcgctcactccccctggacggccctggccctgcacatcctctccctccctgtcacataggccttgctcctcctcaaggctttggctgatggggctggctcccctctgtccatcttcctgacaagcgcctctccccctgctcaggtgcacccacaactcagaacagggaagagcatcgtcactccacgtctgcctccagggctctctcctttctagtacacggcttgaagctccttgaggacacggaccctggcagtgaccttcacagtgcccagaccccaagataatgcagccattcatggaactgcagttgttcattggtcgcctttagttttccaaaataagtgtcatctttagctgaaatcattcattaattcagacaccaaatctcacagatcgaaggagtcagaaattcctttgaaacaacttagcccaaacctttctgtgtcagtatggataaatcaaggcccaatgtctagaaggtcttgggcaaagttgaaattcagggtcagtgacacaacctcaagggaggccccgaaagtgccagctgcacagcagtcccctgcctggctttgctgtttgaccacgtcccgtgtcagtgaatcacgggcatcttcaggagctcagcctgggtcttcatttgtttccctcggccccttcctcagcctcaggacagagctgcagcccccacacattcttccctacagataccagggtgcaacaaggtcgtcagggtgatctcaccttggagagcttcaggggtgcctcctctgtgaccccggagaggtcagccccattgctgaagaccttagtgatgcccagttgacccaggacgctcttcagatcataggttccagtaatggacagtttgggtaaatgtaagctggcagacctgtcgtgcagaaaagaaattcaaggcatggcacagcattcctcttgttcttctgggacccaccacagtgcaagtgttttcttttctgattatttctgccacttactcctgtgtcctccacccacactaagatgggaactcggctttggtttgttctacttttagctcttctacattgagtcaaagaatgttaacatcgaatgaatcacaaaagcttgaaatgccacctcctctgatattctaggtgtcctggaagcctgtctcatcttgccctgtagtgttgggtcacctggcccccagcctgtaacatccccagggccctacacccagagaaacacggggctggtggcagtgcccagtgacaaccgtttagtggataagagaagagtgaccacaccaggctgagtgctcctctctggttttccatgggggagacaatgccaccctgagcagggtctggtgtgagcgggcagcttggctctgggctctctgatccgttaccctctcagcctctttgttctttctcaacccctggagcagagacctcaggaggtgctggcatggaacagagaaattccagcctcgattcctattatgaacccgacaccttttgtattttcatcttggttttacagtgtacaaaacgaactagatcagcagggcatgggcataatcacgaatgcacacacatacactaatgtgtggctcatgtttaagtatcacttactacaggacacccaatctaacagcaccgataaagtgacagagaaacgcaagccttctgcgaacatggcctggctgttccaattccgaaccttgcttttctgggccttgccacacaggctcttcccccgtccccccagggacattctacccttgaactccacactccactgctgcctttgccaggaagcccatctgttcctttttggttctgccagaacgtgtggtggtgctgctgtccctgccctgggcactggatattgggaagggacagtgtccacactggagtgggaagtccccagggacgagacctttacctcctcacccctgggtactgttctcctcatggagcatggacgcgt

SEQ ID NO: 1382 - DNA, 1203 bp, Artificial Sequence
  Description of Artificial Sequence: Synthetic oligonucleotide
aattcgcccttgggcctaggcaattggatccgccggcagagaaaacatcccagggatttacagatcacatgcaggcagggaccagctcaacccttctttaatgtcatccagggagggggccagggatggaggggaggggttgaggagcgagaggcagttatttttgggtgggattcaccacttttcccatgaagaggggagacttggtattttgttcaatcattaagaagacaaagggtttgttgaacttgacctcgggggggatagacatgggtatggcctctaaaaacatggccccagcagcttcagtccctttctcgtcgatggtcagcacagccttatgcacggcctggaggggagagaagcagagacacgttgtaaggctgatcccaggcctcgagcaaggctcacgtggacacctcccaggaagcgctcactccccctggacggccctggccctgcacatcctctccctccctgtcacataggccttgctcctcctcaaggctttggctgatggggctggctcccctctgtccatcttcctgacaagcgcctctccccctgctcaggtgcacccacaactcagaacagggaagagcatcgtcactccacgtctgcctccagggctctctcctttctagtacacggcttgaagctccttgaggacacggaccctggcagtgaccttcacagtgcccagaccccaagataatgcagccattcatggaactgcagttgttcattggtcgcctttagttttccaaaataagtgtcatctttagctgaaatcattcattaattcagacaccaaatctcacagatcgaaggagtcagaaattcctttgaaacaacttagcccaaacctttctgtgtcagtatggataaatcaaggcccaatgtctagaaggtcttgggcaaagttgaaattcagggtcagtgacacaacctcaagggaggccccgaaagtgccagctgcacagcagtcccctgcctggctttgctgtttgaccacgtcccgtgtcagtgaatcacgggcatcttcaggagctcagcctgggtcttcatttgtttccctcggccccttcctcagcctcaggacagagctgcagcccccacacattcttccctacagataccagggtgcaacaaggtcgtcagggtgatctcaccttggagagcttcaggggtgcctccacgcgt

SEQ ID NO: 1383 - DNA, 103 bp, Artificial Sequence
  Description of Artificial Sequence: Synthetic oligonucleotide
aattcgcccttgggcctaggcaattggatccgccggcagagaaaacatcccagggatttacagatcacatgcaggcagggaccagctcaacccttctacgcgt

SEQ ID NO: 1384 - DNA, 55 bp, Artificial Sequence
  Description of Artificial Sequence: Synthetic oligonucleotide
aattcgcccttgggcctaggcaattggatccgccggcagagaaaacatcacgcgt

SEQ ID NO: 1385 - DNA, 1512 bp, Artificial Sequence
  Description of Artificial Sequence: Synthetic oligonucleotide
cgcgtaattcgcccttgggcctaggcaattggatccgccggcagagaaaacatcccagggatttacagatcacatgcaggcagggaccagctcaacccttctttaatgtcatccagggagggggccagggatggaggggaggggttgaggagcgagaggcagttatttttgggtgggattcaccacttttcccatgaagaggggagacttggtattttgttcaatcattaagaagacaaagggtttgttgaacttgacctcgggggggatagacatgggtatggcctctaaaaacatggccccagcagcttcagtccctttctcgtcgatggtcagcacagccttatgcacggcctggaggggagagaagcagagacacgttgtaaggctgatcccaggcctcgagcaaggctcacgtggacacctcccaggaagcgctcactccccctggacggccctggccctgcacatcctctccctccctgtcacataggccttgctcctcctcaaggctttggctgatggggctggctcccctctgtccatcttcctgacaagcgcctctccccctgctcaggtgcacccacaactcagaacagggaagagcatcgtcactccacgtctgcctccagggctctctcctttctagtacacggcttgaagctccttgaggacacggaccctggcagtgaccttcacagtgcccagaccccaagataatgcagccattcatggaactgcagttgttcattggtcgcctttagttttccaaaataagtgtcatctttagctgaaatcattcattaattcagacaccaaatctcacagatcgaaggagtcagaaattcctttgaaacaacttagcccaaacctttctgtgtcagtatggataaatcaaggcccaatgtctagaaggtcttgggcaaagttgaaattcagggtcagtgacacaacctcaagggaggccccgaaagtgccagctgcacagcagtcccctgcctggctttgctgtttgaccacgtcccgtgtcagtgaatcacgggcatcttcaggagctcagcctgggtcttcatttgtttccctcggccccttcctcagcctcaggacagagctgcagcccccacacattcttccctacagataccatggtgcaacaaggtcgtcagggtgatctcaccttggagagcttcaggggtgcctcctctgtgaccccggagaggtcagccccattgctgaagaccttagtgatgcccagttgacccaggacgctcttcagatcataggttccagtaatggacagtttgggtaaatgtaagctggcagacctgtcgtgcagaaaagaaattcaaggcatggcacagcattcctcttgttcttctgggacccaccacagtgcaagtgttttcttttctgattatttctgccacttactcctgtgtcctccacccacactaagatgggaactcggctttggtttgttctacttttagctcttctacattgagtcaaaga

SEQ ID NO: 1386 - DNA, 363 bp, Artificial Sequence
  Description of Artificial Sequence: Synthetic oligonucleotide
aattcgcccttgggcctaggcaattggatccgccggcagagaaaacatcccagggatttacagatcacatgcaggcagggaccagctcaacccttctttaatgtcatccagggagggggccagggatggaggggaggggttgaggagcgagaggcagttatttttgggtgggattcaccacttttcccatgaagaggggagacttggtattttgttcaatcattaagaagacaaagggtttgttgaacttgacctcgggggggatagacatgggtatggcctctaaaaacatggccccagcagcttcagtccctttctcgtcgatggtcagcacagccttatgcacggcctggagggacgcgt

SEQ ID NO: 1387 - DNA, 2395 bp, Artificial Sequence
  Description of Artificial Sequence: Synthetic oligonucleotide
aattcgcccttgggcctaggcaattggatccgccggcagagaaaacatcccagggatttacagatcacatgcaggcagggaccagctcaacccttctttaatgtcatccagggagggggccagggatggaggggaggggttgaggagcgagaggcagttatttttgggtgggattcaccacttttcccatgaagaggggagacttggtattttgttcaatcattaagaagacaaagggtttgttgaacttgacctcgggggggatagacatgggtatggcctctaaaaacatggccccagcagcttcagtccctttctcgtcgatggtcagcacagccttatgcacggcctggaggggagagaagcagagacacgttgtaaggctgatcccaggcctcgagcaaggctcacgtggacacctcccaggaagcgctcactccccctggacggccctggccctgcacatcctctccctccctgtcacataggccttgctcctcctcaaggctttggctgatggggctggctcccctctgtccatcttcctgacaagcgcctctccccctgctcaggtgcacccacaactcagaacagggaagagcatcgtcactccacgtctgcctccagggctctctcctttctagtacacggcttgaagctccttgaggacacggaccctggcagtgaccttcacagtgcccagaccccaagataatgcagccattcatggaactgcaggttgttcattggtcgcctttagttttccaaaataagtgtcactttagctgaaatcattcattaattcagacaccaaatctcacagatcgaaggagtcagaaattcctttgaaacaacttagcccaaacctttctgtgtcagtatggataaatcaaggcccaatgtctagaaggtcttgggcaaagttgaaattcagggtcagtgacacaacctcaagggaggccccgaaagtgccagctgcacagcagcccctgcctggctttgctgtttgcccaccgtcccgtgtcagtgaatcacgggcatcttcaggagctcagcctgggtcttcatttgtttccctcggccccttcctcagcctcaggacagtgctgcagcccccacacattcttccctacagataccatggtgcaacaaggtcgtcagggtgatctcaccttggagagcttcaggggtgcctcctctgtgaccccggagaggtcagccccattgctgaagaccttagtgatgcccagttgacccaggacgctcttcagatcataggttccagtaatggacagtttgggtaaatgtaagctggcagacctgtcgtgcagaaaagaaattcaaggcatggcacagcattcctcttgttcttctgggacccaccacagtgcaagtgttttcttttctgattatttctgccacttactcctgtgtcctccacccacactaagatgggaactcggctttggtttgttctacttttagctcttctacattgagtcaaagaatgttaacatcgaatgaatcacaaaagcttgaaatgccacctcctctgatattctaggtgtcctggaagcctgtctcatcttgccctgtagtgttgggtcacctggcccccagcctgtaacatccccagggccctacacccagagaaacacggggctggtggcagtgcccagtgacaaccgtttagtggataagagaagagtgaccacaccaggctgagtgctcctctctggttttccatggggagacaatgccaccctgagcagggtctggtgtgagcggcagctggctctgggctctctgatccgttaccctctcagcctctttgttctttctcaacccctggagcagagacctcaggaggtgctggcatggaacagagaaattccagcctcgattcctattatgaacccgacaccttttgtattttcatcttggttttacagtgtacaaaacgaactagatcagcagggcatgggcataatcacgaatgcacacacatacactaatgtgtggctcatgtttaagtatcacttactacaggacacccaatctaacagcaccgataaagtgacagagaaacgcaagccttctgcgaacatggcctggctgttccaattccgaaccttgcttttctgggccttgccacacaggctcttcccccgtccccccagggacattctacccttgaactccacactccactgctgcctttgccaggaagcccatctgttcctttttggttctgccagaacgtgtggtggtgctgctgtccctgccttgggcactggatattgggaagggacagtgtccacactggagtgggaagttcccagggacgagacctttacctcctcaccctgggtactgttctcctcatggagcatgg

SEQ ID NO: 1388 - DNA, 97 bp, Artificial Sequence
  Description of Artificial Sequence: Synthetic oligonucleotide
aattcgcccttgggcctaggcaattggatccgccggcagagaaaacatcccagggatttacagatcacatgcaggcagggaccagctcaacccttct

SEQ ID NO: 1389 - DNA, 714 bp, Artificial Sequence
  Description of Artificial Sequence: Synthetic oligonucleotide
aattcgcccttgggcctaggcaattggatccgccggcagagaaaacatcccagggatttacagatcacatgcaggcagggaccagctcaacccttctttaatgtcatccagggagggggccagggatggaggggaggggttgaggagcgagaggcagttatttttgggtgggattcaccacttttcccatgaagaggggagacttggtattttgttcaatcattaagaagacaaagggtttgttgaacttgacctcgggggggatagacatgggtatggcctctaaaaacatggccccagcagcttcagtccctttctcgtcgatggtcagcacagccttatgcacggcctggaggggagagaagcagagacacgttgtaaggctgatcccaggcctcgagcaaggctcacgtggacacctcccaggaagcgctcactccccctggacggccctggccctgcacatcctctccctccctgtcacataggccttgctcctcctcaaggctttggctgatggggctggctcccctctgtccatcttcctgacaagcgcctctccccctgctcaggtgcacccacaactcagaacagggaagagcatcgtcactccacgtctgcctccagggctctctcctttctagtacacggcttgaagctccttgaggacacggaccctggcagtgaccttcacagtgcccagaccatttaaat

SEQ ID NO: 1390 - DNA, 3021 bp, Artificial Sequence
  Description of Artificial Sequence: Synthetic oligonucleotide
aattcgcccttgggcctaggcaattggatccgccggcagagaaaacatcccagggatttacagatcacatgcaggcagggaccagctcaacccttctttaatgtcatccagggagggggccagggatggaggggaggggttgaggagcgagaggcagttatttttgggtgggattcaccacttttcccatgaagaggggagacttggtattttgttcaatcattaagaagacaaagggtttgttgaacttgacctcgggggggatagacatgggtatggcctctaaaaacatggccccagcagcttcagtccctttctcgtcgatggtcagcacagccttatgcacggcctggaggggagagaagcagagacacgttgtaaggctgatcccaggcctcgagcaaggctcacgtggacacctcccaggaagcgctcactccccctggacggccctggccctgcacatcctctccctccctgtcacataggccttgctcctcctcaaggctttggctgatggggctggctcccctctgtccatcttcctgacaagcgcctctccccctgctcaggtgcacccacaactcagaacagggaagagcatcgtcactccacgtctgcctccagggctctctcctttctagtacacggcttgaagctccttgaggacacggaccctggcagtgaccttcacagtgcccagaccccaagataatgcagccattcatggaactgcaggttgttcattggtcgcctttagttttccaaaataagtgtcactttagctgaaatcattcattaattcagacaccaaatctcacagatcgaaggagtcagaaattcctttgaaacaacttagcccaaacctttctgtgtcagtatggataaatcaaggcccaatgtctagaaggtcttgggcaaagttgaaattcagggtcagtgacacaacctcaagggaggccccgaaagtgccagctgcacagcagcccctgcctggctttgctgtttgcccaccgtcccgtgtcagtgaatcacgggcatcttcaggagctcagcctgggtcttcatttgtttccctcggccccttcctcagcctcaggacagtgctgcagcccccacacattcttccctacagataccatggtgcaacaaggtcgtcagggtgatctcaccttggagagcttcaggggtgcctcctctgtgaccccggagaggtcagccccattgctgaagaccttagtgatgcccagttgacccaggacgctcttcagatcataggttccagtaatggacagtttgggtaaatgtaagctggcagacctgtcgtgcagaaaagaaattcaaggcatggcacagcattcctcttgttcttctgggacccaccacagtgcaagtgttttcttttctgattatttctgccacttactcctgtgtcctccacccacactaagatgggaactcggctttggtttgttctacttttagctcttctacattgagtcaaagaatgttaacatcgaatgaatcacaaaagcttgaaatgccacctcctctgatattctaggtgtcctggaagcctgtctcatcttgccctgtagtgttgggtcacctggcccccagcctgtaacatccccagggccctacacccagagaaacacggggctggtggcagtgcccagtgacaaccgtttagtggataagagaagagtgaccacaccaggctgagtgctcctctctggttttccatggggagacaatgccaccctgagcagggtctggtgtgagcggcagctggctctgggctctctgatccgttaccctctcagcctctttgttctttctcaacccctggagcagagacctcaggaggtgctggcatggaacagagaaattccagcctcgattcctattatgaacccgacaccttttgtattttcatcttggttttacagtgtacaaaacgaactagatcagcagggcatgggcataatcacgaatgcacacacatacactaatgtgtggctcatgtttaagtatcacttactacaggacacccaatctaacagcaccgataaagtgacagagaaacgcaagccttctgcgaacatggcctggctgttccaattccgaaccttgcttttctgggccttgccacacaggctcttcccccgtccccccagggacattctacccttgaactccacactccactgctgcctttgccaggaagcccatctgttcctttttggttctgccagaacgtgtggtggtgctgctgtccctgccttgggcactggatattgggaagggacagtgtccacactggagtgggaagttcccagggacgagacctttacctcctcaccctgggtactgttctcctcatggagcatggacggcgctgcctgaactcagtggtggcctcattctggaagccaagtttatacagagtagcagtgacccagggatgtggggttcaccctcctcagccctctggccagtcctgatgggcctcagtcccaacatggctaagaggtgtgggcagcttcttggtcaccctcaggttggggaatcaccttctgtcttcattttccaggaacttggtgatgatatcgtgggtgagttcatttaccaggtgctgtagtttcccctcatcaggcaggaagaagatggcggtggcattgcccaggtatttcatcagcagcacccagctggacagcttcttacagtgctggatgttaaacatgcctaaacgcttcatcataggcaccttcacggtggtcacctggtccacgtggaagtcctcttcctcggtgtccttgacttcaaagggtctctcccatttgcctggagagaggggaaggtgggcatcaccaggggtgagtgaaggtttggaagagtgtagcagaataagaaaccatgagtcccctccctgagaagccctgagcccccttgacgacacacatccctcgaggctcagcttcatcatctgtaaaaggtgctgaaactgaccatttaaat

SEQ ID NO: 1391 - DNA, 1209 bp, Artificial Sequence
  Description of Artificial Sequence: Synthetic oligonucleotide
tctgtgaccccggagaggtcagccccattgctgaagaccttagtgatgcccagttgacccaggacgctcttcagatcataggttccagtaatggacagtttgggtaaatgtaagctggcagacctgtcgtgcagaaaagaaattcaaggcatggcacagcattcctcttgttcttctgggacccaccacagtgcaagtgttttcttttctgattatttctgccacttactcctgtgtcctccacccacactaagatgggaactcggctttggtttgttctacttttagctcttctacattgagtcaaagaatgttaacatcgaatgaatcacaaaagcttgaaatgccacctcctctgatattctaggtgtcctggaagcctgtctcatcttgccctgtagtgttgggtcacctggcccccagcctgtaacatccccagggccctacacccagagaaacacggggctggtggcagtgcccagtgacaaccgtttagtggataagagaagagtgaccacaccaggctgagtgctcctctctggttttccatggggagacaatgccaccctgagcagggtctggtgtgagcgggcagcttggctctgggctctctgatccgttaccctctcagcctctttgttctttctcaacccctggagcagagacctcaggaggtgctggcatggaacagagaaattccagcctcgattcctattatgaacccgacaccttttgtattttcatcttggttttacagtgtacaaaacgaactagatcagcagggcatgggcataatcacgaatgcacacacatacactaatgtgtggctcatgtttaagtatcacttactacaggacacccaatctaacagcaccgataaagtgacagagaaacgcaagccttctgcgaacatggcctggctgttccaattccgaaccttgcttttctgggccttgccacacaggctcttcccccgtccccccagggacattctacccttgaactccacactccactgctgcctttgccaggaagcccatctgttcctttttggttctgccagaacgtgtggtggtgctgctgtccctgccctgggcactggatattgggaagggacagtgtccacactggagtgggaagtccccagggacgagacctttacctcctcacccctgggtactgttctcctcatggagcatggatttaaat

SEQ ID NO: 1392 - DNA, 56 bp, Artificial Sequence
  Description of Artificial Sequence: Synthetic oligonucleotide
ccagggatttacagatcacatgcaggcagggaccagctcaactcttctatttaaat

SEQ ID NO: 1393 - DNA, 1519 bp, Artificial Sequence
  Description of Artificial Sequence: Synthetic oligonucleotide
aatgttaacatcgaatgaatcacaaaagcttgaaatgccacctcctctgatattctaggtgtcctggaagcctgtctcatcttgccctgtagtgttgggtcacctggcccccagcctgtaacatccccagggccctacacccagagaaacacggggctggtggcagtgcccagtgacaaccgtttagtggataagagaagagtgaccacaccaggctgagtgctcctctctggttttccatggggagacaatgccaccctgagcagggtctggtgtgagcgggcagcttggctctgggctctctgatccgttaccctctcagcctctttgttctttctcaacccctggagcagagacctcaggaggtgctggcatggaacagagaaattccagcctcgattcctattatgaacccgacaccttttgtattttcatcttggttttacagtgtacaaaacgaactagatcagcagggcatgggcataatcacgaatgcacacacatacactaatgtgtggctcatgtttaagtatcacttactacaggacacccaatctaacagcaccgataaagtgacagagaaacgcaagccttctgcgaacatggcctggctgttccaattccgaaccttgcttttctgggccttgccacacaggctcttcccccgtccccccagggacattctacccttgaactccacactccactgctgcctttgccaggaagcccatctgttcctttttggttctgccagaacgtgtggtggtgctgctgtccctgccctgggcactggatattgggaagggacagtgtccacactggagtgggaagtccccagggacgagacctttacctcctcacccctgggtactgtcctcctcatggagcatggatggcgctgcctgaactcagtggtggcctcattctggaagccaagtttatacagagtagcagtgacccagggatgtggggttcaccctcctcagccctctggccagtcctgatgggcctcagtcccaacatggctaagaggtgtgggcagcttcttggtcaccctcaggttggggaatcaccttctgtcttcattttccaggaacttggtgatgatatcgtgggtgagttcattttccaggtgctgtagtttcccctcatcaggcaggaagaagatggcggtggcattgcccaggtatttcatcagcagcacccagctggacagcttcttacagtgctggatgttaaacatgcctaaacgcttcatcataggcaccttcacggtggtcacctggtccacgtggaagtcctcttcctcggtgtccttgacttcaaagggtctctcccatttgcctggagagaggggaaggtgggcatcaccaggggtgagtgaaggtttggaagagtgtagcagaataaagaaaccatgagtcccctccctgagaagccctgagcccccttgacgacacacatccctcgaggctcagcttcatcatctgtaaaaggtgctgaaactgaccatttaaat

SEQ ID NO: 1394 - DNA, 357 bp, Artificial Sequence
  Description of Artificial Sequence: Synthetic oligonucleotide
gagagaagcagagacacgttgtaaggctgatcccaggcctcgagcaaggctcacgtggacacctcccaggaagcgctcactccccctggacggccctggccctgcacatcctctccctccctgtcacataggccttgctcctcctcaaggctttggctgatggggctggctcccctctgtccatcttcctgacaagcgcctctccccctgctcaggtgcacccacaactcagaacagggaagagcatcgtcactccacgtctgcctccagggctctctcctttctagtacacggcttgaagctccttgaggacacggaccctggcagtgaccttcacagtgcccagaccatttaaat

SEQ ID NO: 1395 - DNA, 2403 bp, Artificial Sequence
  Description of Artificial Sequence: Synthetic oligonucleotide
aattcgcccttgggcctaggcaattggatccgccggcagagaaaacatcccagggatttacagatcacatgcaggcagggaccagctcaacccttctttaatgtcatccagggagggggccagggatggaggggaggggttgaggagcgagaggcagttatttttgggtgggattcaccacttttcccatgaagaggggagacttggtattttgttcaatcattaagaagacaaagggtttgttgaacttgacctcgggggggatagacatgggtatggcctctaaaaacatggccccagcagcttcagtccctttctcgtcgatggtcagcacagccttatgcacggcctggaggggagagaagcagagacacgttgtaaggctgatcccaggcctcgagcaaggctcacgtggacacctcccaggaagcgctcactccccctggacggccctggccctgcacatcctctccctccctgtcacataggccttgctcctcctcaaggctttggctgatggggctggctcccctctgtccatcttcctgacaagcgcctctccccctgctcaggtgcacccacaactcagaacagggaagagcatcgtcactccacgtctgcctccagggctctctcctttctagtacacggcttgaagctccttgaggacacggaccctggcagtgaccttcacagtgcccagaccccaagataatgcagccattcatggaactgcaggttgttcattggtcgcctttagttttccaaaataagtgtcactttagctgaaatcattcattaattcagacaccaaatctcacagatcgaaggagtcagaaattcctttgaaacaacttagcccaaacctttctgtgtcagtatggataaatcaaggcccaatgtctagaaggtcttgggcaaagttgaaattcagggtcagtgacacaacctcaagggaggccccgaaagtgccagctgcacagcagcccctgcctggctttgctgtttgcccaccgtcccgtgtcagtgaatcacgggcatcttcaggagctcagcctgggtcttcatttgtttccctcggccccttcctcagcctcaggacagtgctgcagcccccacacattcttccctacagataccatggtgcaacaaggtcgtcagggtgatctcaccttggagagcttcaggggtgcctcctctgtgaccccggagaggtcagccccattgctgaagaccttagtgatgcccagttgacccaggacgctcttcagatcataggttccagtaatggacagtttgggtaaatgtaagctggcagacctgtcgtgcagaaaagaaattcaaggcatggcacagcattcctcttgttcttctgggacccaccacagtgcaagtgttttcttttctgattatttctgccacttactcctgtgtcctccacccacactaagatgggaactcggctttggtttgttctacttttagctcttctacattgagtcaaagaatgttaacatcgaatgaatcacaaaagcttgaaatgccacctcctctgatattctaggtgtcctggaagcctgtctcatcttgccctgtagtgttgggtcacctggcccccagcctgtaacatccccagggccctacacccagagaaacacggggctggtggcagtgcccagtgacaaccgtttagtggataagagaagagtgaccacaccaggctgagtgctcctctctggttttccatggggagacaatgccaccctgagcagggtctggtgtgagcggcagctggctctgggctctctgatccgttaccctctcagcctctttgttctttctcaacccctggagcagagacctcaggaggtgctggcatggaacagagaaattccagcctcgattcctattatgaacccgacaccttttgtattttcatcttggttttacagtgtacaaaacgaactagatcagcagggcatgggcataatcacgaatgcacacacatacactaatgtgtggctcatgtttaagtatcacttactacaggacacccaatctaacagcaccgataaagtgacagagaaacgcaagccttctgcgaacatggcctggctgttccaattccgaaccttgcttttctgggccttgccacacaggctcttcccccgtccccccagggacattctacccttgaactccacactccactgctgcctttgccaggaagcccatctgttcctttttggttctgccagaacgtgtggtggtgctgctgtccctgccttgggcactggatattgggaagggacagtgtccacactggagtgggaagttcccagggacgagacctttacctcctcaccctgggtactgttctcctcatggagcatggatttaaat

SEQ ID NO: 1396 - DNA, 105 bp, Artificial Sequence
  Description of Artificial Sequence: Synthetic oligonucleotide
aattcgcccttgggcctaggcaattggatccgccggcagagaaaacatcccagggatttacagatcacatgcaggcagggaccagctcaacccttctatttaaat

SEQ ID NO: 1397 - DNA, 382 bp, Artificial Sequence
  Description of Artificial Sequence: Synthetic oligonucleotide
cgcgtcgacattgattattgactagttattaatagtaatcaattacggggtcattagttcatagcccatatatggagttccgcgttacataacttacggtaaatggcccgcctggctgaccgcccaacgacccccgcccattgacgtcaataatgacgtatgttcccatagtaacgccaatagggactttccattgacgtcaatgggtggagtatttacggtaaactgcccacttggcagtacatcaagtgtatcatatgccaagtacgccccctattgacgtcaatgacggtaaatggcccgcctggcattatgcccagtacatgaccttatgggactttcctacttggcagtacatctacgtattagtcatcgctattac

SEQ ID NO: 1398 - DNA, 303 bp, Artificial Sequence
  Description of Artificial Sequence: Synthetic oligonucleotide
cgttacataacttacggtaaatggcccgcctggctgaccgcccaacgacccccgcccattgacgtcaataatgacgtatgttcccatagtaacgccaatagggactttccattgacgtcaatgggtggagtatttacggtaaactgcccacttggcagtacatcaagtgtatcatatgccaagtacgccccctattgacgtcaatgacggtaaatggcccgcctggcattatgcccagtacatgaccttatgggactttcctacttggcagtacatctagtattagtcatcgctattaccatg

SEQ ID NO: 1399 - DNA, 260 bp, Artificial Sequence
  Description of Artificial Sequence: Synthetic oligonucleotide
ccacgttctgcttcactctccccatctcccccccctccccacccccaattttgtatttatttattttttaattattttgtgcagcgatgggggcggggggggggggcgcgcgccaggcggggcggggcggggcgaggggcggggcggggcgaggcggagaggtgcggcggcagccaatcagagcggcgcgctccgaaagtttccttttatggcgaggcggcggcggcggcggccctataaaaagcgaagcgcgcggcggg

SEQ ID NO: 1400 - DNA, 588 bp, Artificial Sequence
  Description of Artificial Sequence: Synthetic oligonucleotide
gttgacattgattattgactagttattaatagtaatcaattacggggtcattagttcatagcccatatatggagttccgcgttacataacttacggtaaatggcccgcctggctgaccgcccaacgacccccgcccattgacgtcaataatgacgtatgttcccatagtaacgccaatagggactttccattgacgtcaatgggtggagtatttacggtaaactgcccacttggcagtacatcaagtgtatcatatgccaagtacgccccctattgacgtcaatgacggtaaatggcccgcctggcattatgcccagtacatgaccttatgggactttcctacttggcagtacatctacgtattagtcatcgctattaccatggtgatgcggttttggcagtacatcaatgggcgtggatagcggtttgactcacggggatttccaagtctccaccccattgacgtcaatgggagtttgttttggcaccaaaatcaacgggactttccaaaatgtcgtaacaactccgccccattgacgcaaatgggcggtaggcgtgtacggtgggaggtctatataagcagagctc

SEQ ID NO: 1401 - DNA, 204 bp, Artificial Sequence
  Description of Artificial Sequence: Synthetic oligonucleotide
gtgatgcggttttggcagtacatcaatgggcgtggatagcggtttgactcacggggatttccaagtctccaccccattgacgtcaatgggagtttgttttggcaccaaaatcaacgggactttccaaaatgtcgtaacaactccgccccattgacgcaaatgggcggtaggcgtgtacggtgggaggtctatataagcagagct

SEQ ID NO: 1402 - DNA, 219 bp, Artificial Sequence
  Description of Artificial Sequence: Synthetic oligonucleotide
aattcgaacgctgacgtcatcaacccgctccaaggaatcgcgggcccagtgtcactaggcgggaacacccagcgcgcgtgcgccctggcaggaagatggctgtgagggacagggagtggcgccctgcaatatttgcatgtcgctatgtgttctgggaaatcaccataaacgtgaaatgtctttggatttgggaatcttataagttctgtatgagaccac

SEQ ID NO: 1403 - DNA, 17 bp, Artificial Sequence
  Description of Artificial Sequence: Synthetic oligonucleotide
taatacgactcactata

SEQ ID NO: 1404 - DNA, 134 bp, Artificial Sequence
  Description of Artificial Sequence: Synthetic oligonucleotide
tcagatcgcctggagacgccatccacgctgttttgacctccatagaagacaccgggaccgatccagcctccgcggattcgaatcccggccgggaacggtgcattggaacgcggattccccgtgccaagagtgac

SEQ ID NO: 1405 - DNA, 53 bp, Artificial Sequence
  Description of Artificial Sequence: Synthetic oligonucleotide
ctcctgggcaacgtgctggtctgtgtgctggcccatcactttggcaaagaatt

SEQ ID NO: 1406 - DNA, 172 bp, Artificial Sequence
  Description of Artificial Sequence: Synthetic oligonucleotide
gaactgaaaaaccagaaagttaactggtaagtttagtctttttgtcttttatttcaggtcccggatccggtggtggtgcaaatcaaagaactgctcctcagtggatgttgcctttacttctaggcctgtacggaagtgttacttctgctctaaaagctgcggaattgtaccc

SEQ ID NO: 1407 - DNA, 32 bp, Artificial Sequence
  Description of Artificial Sequence: Synthetic oligonucleotide
gtaagtaccgcctatagagtctataggcccac

SEQ ID NO: 1408 - DNA, 347 bp, Artificial Sequence
  Description of Artificial Sequence: Synthetic oligonucleotide
aaaaaatgctttcttcttttaatatacttttttgtttatcttatttctaatactttccctaatctctttctttcagggcaataatgatacaatgtatcatgcctctttgcaccattctaaagaataacagtgataatttctgggttaaggcaatagcaatatttctgcatataaatatttctgcatataaattgtaactgatgtaagaggtttcatattgctaatagcagctacaatccagctaccattctgcttttattttatggttgggataaggctggattattctgagtccaagctaggcccttttgctaatcatgttcatacctcttatcttcctcccacag

SEQ ID NO: 1409 - DNA, 201 bp, Artificial Sequence
  Description of Artificial Sequence: Synthetic oligonucleotide
gaactgaaaaaccagaaagttaactggtaagtttagtctttttgtcttttatttcaggtcccggatccggtggtggtgcaaatcaaagaactgctcctcagtggatgttgcctttacttctaggcctgtacggaagtgttacttctgctctaaaagctgcggaattgtacccgcggccgatccaccggtaaacttaagctt

SEQ ID NO: 1410 - DNA, 127 bp, Artificial Sequence
  Description of Artificial Sequence: Synthetic oligonucleotide
gatctttttccctctgccaaaaattatggggacatcatgaagccccttgagcatctgacttctggctaataaaggaaatttattttcattgcaatagtgtgttggaattttttgtgtctctcactcg

SEQ ID NO: 1411 - DNA, 225 bp, Artificial Sequence
  Description of Artificial Sequence: Synthetic oligonucleotide
ctgtgccttctagttgccagccatctgttgtttgcccctcccccgtgccttccttgaccctggaaggtgccactcccactgtcctttcctaataaaatgaggaaattgcatcgcattgtctgagtaggtgtcattctattctggggggtggggtggggcaggacagcaagggggaggattgggaagacaatagcaggcatgctggggatgcggtgggctctatgg

SEQ ID NO: 1412 - DNA, 477 bp, Artificial Sequence
  Description of Artificial Sequence: Synthetic oligonucleotide
gggtggcatccctgtgacccctccccagtgcctctcctggccctggaagttgccactccagtgcccaccagccttgtcctaataaaattaagttgcatcattttgtctgactaggtgtccttctataatattatggggtggaggggggtggtatggagcaaggggcaagttgggaagacaacctgtagggcctgcggggtctattgggaaccaagctggagtgcagtggcacaatcttggctcactgcaatctccgcctcctgggttcaagcgattctcctgcctcagcctcccgagttgttgggattccaggcatgcatgaccaggctcagctaatttttgtttttttggtagagacggggtttcaccatattggccaggctggtctccaactcctaatctcaggtgatctacccaccttggcctcccaaattgctgggattacaggcgtgaaccactgctcccttccctgtcctt

SEQ ID NO: 1413 - DNA, 476 bp, Artificial Sequence
  Description of Artificial Sequence: Synthetic oligonucleotide
gggtggcatccctgtgacccctccccagtgcctctcctggccctggaagttgccactccagtgcccaccagccttgtcctaataaaattaagttgcatcattttgtctgactaggtgtccttctataatattatggggtggaggggggtggtatggagcaaggggcaagttgggaagacaacctgtagggcctgcggggtctattgggaaccaagctggagtgcagtggcacaatcttggctcactgcaatctccgcctcctgggttcaagcgattctcctgcctcagcctcccgagttgttgggattccaggcatgcatgaccaggctcagctaatttttgtttttttggtagagacggggtttcaccatattggccaggctggtctccaactcctaatctcaggtgatctacccaccttggcctcccaaattgctgggattacaggcgtgaaccactgctcccttccctgtcct

SEQ ID NO: 1414 - DNA, 1975 bp, Artificial Sequence
  Description of Artificial Sequence: Synthetic polynucleotide
ctgcgcgctcgctcgctcactgaggccgcccgggcaaagcccgggcgtcgggcgacctttggtcgcccggcctcagtgagcgagcgagcgcgcagagagggagtgtagccatgctctaggaagatcaattcaattcacgcgtcgacattgattattgactagttattaatagtaatcaattacggggtcattagttcatagcccatatatggagttccgcgttacataacttacggtaaatggcccgcctggctgaccgcccaacgacccccgcccattgacgtcaataatgacgtatgttcccatagtaacgccaatagggactttccattgacgtcaatgggtggagtatttacggtaaactgcccacttggcagtacatcaagtgtatcatatgccaagtacgccccctattgacgtcaatgacggtaaatggcccgcctggcattatgcccagtacatgaccttatgggactttcctacttggcagtacatctacgtattagtcatcgctattaccatgtcgaggccacgttctgcttcactctccccatctcccccccctccccacccccaattttgtatttatttattttttaattattttgtgcagcgatgggggcggggggggggggcgcgcgccaggcggggcggggcggggcgaggggcggggcggggcgaggcggagaggtgcggcggcagccaatcagagcggcgcgctccgaaagtttccttttatggcgaggcggcggcggcggcggccctataaaaagcgaagcgcgcggcgggcgggagcaagcttgcctggagacgccatccacgctgttttgacctccatagaagacaccgggaccgatccagcctccgcggattcgaatcccggccgggaacggtgcattggaacgcggattccccgtgccaagagtgacgtaagtaccgcctatagagtctataggcccacaaaaaatgctttcttcttttaatatacttttttgtttatcttatttctaatactttccctaatctctttctttcagggcaataatgatacaatgtatcatgcctctttgcaccattctaaagaataacagtgataatttctgggttaaggcaatagcaatatttctgcatataaatatttctgcatataaattgtaactgatgtaagaggtttcatattgctaatagcagctacaatccagctaccattctgcttttattttatggttgggataaggctggattattctgagtccaagctaggcccttttgctaatcatgttcatacctcttatcttcctcccacagctcctgggcaacgtgctggtctgtgtgctggcccatcactttggcaaagaattgggattcgaacatcgaccggtgaagcaaagaaggggcagagggagcccgtgagctgagtgggccagggactgggagaaggagtgaggaggcagggccggcatgcctctgctgctggccagaccccttaactcatttgttcccgtctgcacctgtcactagtaacagatgagttaaggggtttggccgtgtagtgctacccagcgctggctgcctcctcagcattgcaattcctctcccatctgggcaccagtcagctaccctggtgggaatctgggtagccctcgaggacggggtgaactacgcctgaggatccgatctttttccctctgccaaaaattatggggacatcatgaagccccttgagcatctgacttctggctaataaaggaaatttattttcattgcaatagtgtgttggaattttttgtgtctctcactcggcctaggtagataagtagcatggcgggttaatcattaactacaaggaacccctagtgatggagttggccactccctctctgcgcgctcgctcgctcactgaggccgggcgaccaaaggtcgcccgacgcccgggctttgcccgggcggcctcagtgagcgagcgagcgcgcag

SEQ ID NO: 1415 - DNA, 1900 bp, Artificial Sequence
  Description of Artificial Sequence: Synthetic polynucleotide
ctgcgcgctcgctcgctcactgaggccgcccgggcaaagcccgggcgtcgggcgacctttggtcgcccggcctcagtgagcgagcgagcgcgcagagagggagtgtagccatgctctaggaagatcaattcaattcacgcgtatatctagactagttattaatagtaatcaattacggggtcattagttcatagcccatatatggagttccgcgttacataacttacggtaaatggcccgcctggctgaccgcccaacgacccccgcccattgacgtcaataatgacgtatgttcccatagtaacgtcaatagggactttccattgacgtcaatgggtggagtatttacggtaaactgcccacttggcagtacatcaagtgtatcatatgccaagtacgccccctattgacgtcaatgacggtaaatggcccgcctggcattatgcccagtacatgaccttatgggactttcctacttggcagtacatctacgtattagtcatcgctattaccatggtgatgcggttttggcagtacatcaatgggcgtggatagcggtttgactcacggggatttccaagtctccaccccattgacgtcaatgggagtttgttttgcaccaaaatcaacgggactttccaaaatgtcgtaacaactccgccccattgacgcaaatgggcggtaggcgtgtacggtgggaggtctatataagcagagctcgtttagtgaaccgtcagatcgcctggagacgccatccacgctgttttgacctccatagaagacaccgggaccgatccagcctccgcggattcgaatcccggccgggaacggtgcattggaacgcggattccccgtgccaagagtgacgtaagtaccgcctatagagtctataggcccacaaaaaatgctttcttcttttaatatacttttttgtttatcttatttctaatactttccctaatctctttctttcagggcaataatgatacaatgtatcatgcctctttgcaccattctaaagaataacagtgataatttctgggttaaggcaatagcaatatttctgcatataaatatttctgcatataaattgtaactgatgtaagaggtttcatattgctaatagcagctacaatccagctaccattctgcttttattttatggttgggataaggctggattattctgagtccaagctaggcccttttgctaatcatgttcatacctcttatcttcctcccacagctcctgggcaacgtgctggtctgtgtgctggcccatcactttggcaaagaattggaccggtgaagcaaagaaggggcagagggagcccgtgagctgagtgggccagggactgggagaaggagtgaggaggcagggccggcatgcctctgctgctggccagaccccttaactcatttgttcccgtctgcacctgtcactagtaacagatgagttaaggggtttggccgtgtagtgctacccagcgctggctgcctcctcagcattgcaattcctctcccatctgggcaccagtcagctaccctggtgggaatctgggtagccctcgaggacggggtgaactacgcctgaggatccgatctttttccctctgccaaaaattatggggacatcatgaagccccttgagcatctgacttctggctaataaaggaaatttattttcattgcaatagtgtgttggaattttttgtgtctctcactcggcctaggtagataagtagcatggcgggttaatcattaactacaaggaacccctagtgatggagttggccactccctctctgcgcgctcgctcgctcactgaggccgggcgaccaaaggtcgcccgacgcccgggctttgcccgggcggcctcagtgagcgagcgagcgcgcag

SEQ ID NO: 1416 - DNA, 1881 bp, Artificial Sequence
  Description of Artificial Sequence: Synthetic polynucleotide
ctgcgcgctcgctcgctcactgaggccgcccgggcaaagcccgggcgtcgggcgacctttggtcgcccggcctcagtgagcgagcgagcgcgcagagagggagtgtagccatgctctaggaagatcaattcaattcacgcgtcgacattgattattgactagttattaatagtaatcaattacggggtcattagttcatagcccatatatggagttccgcgttacataacttacggtaaatggcccgcctggctgaccgcccaacgacccccgcccattgacgtcaataatgacgtatgttcccatagtaacgccaatagggactttccattgacgtcaatgggtggagtatttacggtaaactgcccacttggcagtacatcaagtgtatcatatgccaagtacgccccctattgacgtcaatgacggtaaatggcccgcctggcattatgcccagtacatgaccttatgggactttcctacttggcagtacatctacgtattagtcatcgctattaccatgtcgaggccacgttctgcttcactctccccatctcccccccctccccacccccaattttgtatttatttattttttaattattttgtgcagcgatgggggcggggggggggggcgcgcgccaggcggggcggggcggggcgaggggcggggcggggcgaggcggagaggtgcggcggcagccaatcagagcggcgcgctccgaaagtttccttttatggcgaggcggcggcggcggcggccctataaaaagcgaagcgcgcggcgggcgggagcaagcttgcctggagacgccatccacgctgttttgacctccatagaagacaccgggaccgatccagcctccgcggattcgaatcccggccgggaacggtgcattggaacgcggattccccgtgccaagagtgacgtaagtaccgcctatagagtctataggcccacaaaaaatgctttcttcttttaatatacttttttgtttatcttatttctaatactttccctaatctctttctttcagggcaataatgatacaatgtatcatgcctctttgcaccattctaaagaataacagtgataatttctgggttaaggcaatagcaatatttctgcatataaatatttctgcatataaattgtaactgatgtaagaggtttcatattgctaatagcagctacaatccagctaccattctgcttttattttatggttgggataaggctggattattctgagtccaagctaggcccttttgctaatcatgttcatacctcttatcttcctcccacagctcctgggcaacgtgctggtctgtgtgctggcccatcactttggcaaagaattgggattcgaacatcgaccggtaccgagctgtgctgggcggggggcggcgggccctcccgcagaacaccatgcgctcttcggaacccttaactgatctgttaacctgtgacctggttaacagatgagttaagggttctgtggagcgccttgacagcagccatgggagggccgccccctacctcagtgactcgaggacggggtgaactacgcctgaggatccgatctttttccctctgccaaaaattatggggacatcatgaagccccttgagcatctgacttctggctaataaaggaaatttattttcattgcaatagtgtgttggaattttttgtgtctctcactcggcctaggtagataagtagcatggcgggttaatcattaactacaaggaacccctagtgatggagttggccactccctctctgcgcgctcgctcgctcactgaggccgggcgaccaaaggtcgcccgacgcccgggctttgcccgggcggcctcagtgagcgagcgagcgcgcag

SEQ ID NO: 1417 - DNA, 1805 bp, Artificial Sequence
  Description of Artificial Sequence: Synthetic polynucleotide
ctgcgcgctcgctcgctcactgaggccgcccgggcaaagcccgggcgtcgggcgacctttggtcgcccggcctcagtgagcgagcgagcgcgcagagagggagtgtagccatgctctaggaagatcaattcaattcacgcgtaccgagctctagttattaatagtaatcaattacggggtcattagttcatagcccatatatggagttccgcgttacataacttacggtaaatggcccgcctggctgaccgcccaacgacccccgcccattgacgtcaataatgacgtatgttcccatagtaacgtcaatagggactttccattgacgtcaatgggtggagtatttacggtaaactgcccacttggcagtacatcaagtgtatcatatgccaagtacgccccctattgacgtcaatgacggtaaatggcccgcctggcattatgcccagtacatgaccttatgggactttcctacttggcagtacatctacgtattagtcatcgctattaccatggtgatgcggttttggcagtacatcaatgggcgtggatagcggtttgactcacggggatttccaagtctccaccccattgacgtcaatgggagtttgttttgcaccaaaatcaacgggactttccaaaatgtcgtaacaactccgccccattgacgcaaatgggcggtaggcgtgtacggtgggaggtctatataagcagagctcgtttagtgaaccgtcagatcgcctggagacgccatccacgctgttttgacctccatagaagacaccgggaccgatccagcctccgcggattcgaatcccggccgggaacggtgcattggaacgcggattccccgtgccaagagtgacgtaagtaccgcctatagagtctataggcccacaaaaaatgctttcttcttttaatatacttttttgtttatcttatttctaatactttccctaatctctttctttcagggcaataatgatacaatgtatcatgcctctttgcaccattctaaagaataacagtgataatttctgggttaaggcaatagcaatatttctgcatataaatatttctgcatataaattgtaactgatgtaagaggtttcatattgctaatagcagctacaatccagctaccattctgcttttattttatggttgggataaggctggattattctgagtccaagctaggcccttttgctaatcatgttcatacctcttatcttcctcccacagctcctgggcaacgtgctggtctgtgtgctggcccatcactttggcaaagaattggaccggtaccgagctgtgctgggcggggggcggcgggccctcccgcagaacaccatgcgctcttcggaacccttaactgatctgttaacctgtgacctggttaacagatgagttaagggttctgtggagcgccttgacagcagccatgggagggccgccccctacctcagtgactcgaggacggggtgaactacgcctgaggatccgatctttttccctctgccaaaaattatggggacatcatgaagccccttgagcatctgacttctggctaataaaggaaatttattttcattgcaatagtgtgttggaattttttgtgtctctcactcggcctaggtagataagtagcatggcgggttaatcattaactacaaggaacccctagtgatggagttggccactccctctctgcgcgctcgctcgctcactgaggccgggcgaccaaaggtcgcccgacgcccgggctttgcccgggcggcctcagtgagcgagcgagcgcgcag

SEQ ID NO: 1418 - protein, 743 aa, Artificial Sequence
  Description of Artificial Sequence: Synthetic polypeptide
MAADGYLPDWLEDNLSEGIREWWALKPGAPQPKANQQHQDNARGLVLPGYKYLGPGNGLDKGEPVNAADAAALEHDKAYDQQLKAGDNPYLKYNHADAEFQERLKEDTSFGGNLGRAVFQAKKRLLEPLGLVEEAAKTAPGKKRPVEQSPQEPDSSAGIGKSGAQPAKKRLNFGQTGDTESVPDPQPIGEPPAAPSGVGSLTMASGGGAPVADNNEGADGVGSSSGNWHCDSQWLGDRVITTSTRTWALPTYNNHLYKQISNSTSGGSSNDNAYFGYSTPWGYFDFNRFHCHFSPRDWQRLINNNWGFRPKRLNFKLFNIQVKEVTDNNGVKTIANNLTSTVQVFTDSDYQLPYVLGSAHEGCLPPFPADVFMIPQYGYLTLNDGSQAVGRSSFYCLEYFPSQMLRTGNNFQFSYEFENVPFHSSYAHSQSLDRLMNPLIDQYLYYLSRTINGSGQNQQTLKFSVAGPSNMAVQGRNYIPGPSYRQQRVSTTVTQNNNSEFAWPGASSWALNGRNSLMNPGPAMASHKEGEDRFFPLSGSLIFGKQGTGRDNVDADKVMITNEEEIKTTNPVATESYGQVATNHQSDGTLAVPFKAQAQTGWVQNQGILPGMVWQDRDVYLQGPIWAKIPHTDGNFHPSPLMGGFGMKHPPPQILIKNTPVPADPPTAFNKDKLNSFITQYSTGQVSVEIEWELQKENSKRWNPEIQYTSNYYKSNNVEFAVNTEGVYSEPRPIGTRYLTRNL

SEQ ID NO: 1419 - protein, 743 aa, Artificial Sequence
  Description of Artificial Sequence: Synthetic polypeptide
MAADGYLPDWLEDNLSEGIREWWALKPGAPQPKANQQHQDNARGLVLPGYKYLGPGNGLDKGEPVNAADAAALEHDKAYDQQLKAGDNPYLKYNHADAEFQERLKEDTSFGGNLGRAVFQAKKRLLEPLGLVEEAAKTAPGKKRPVEQSPQEPDSSAGIGKSGAQPAKKRLNFGQTGDTESVPDPQPIGEPPAAPSGVGSLTMASGGGAPVADNNEGADGVGSSSGNWHCDSQWLGDRVITTSTRTWALPTYNNHLYKQISNSTSGGSSNDNAYFGYSTPWGYFDFNRFHCHFSPRDWQRLINNNWGFRPKRLNFKLFNIQVKEVTDNNGVKTIANNLTSTVQVFTDSDYQLPYVLGSAHEGCLPPFPADVFMIPQYGYLTLNDGSQAVGRSSFYCLEYFPSQMLRTGNNFQFSYEFENVPFHSSYAHSQSLDRLMNPLIDQYLYYLSRTINGSGQNQQTLKFSVAGPSNMAVQGRNYIPGPSYRQQRVSTTVTQNNNSEFAWPGASSWALNGRNSLMNPGPAMASHKEGEDRFFPLSGSLIFGKQGTGRDNVDADKVMITNEEEIKTTNPVATESYGQVATNHQSAQQAVRTSLAQAQTGWVQNQGILPGMVWQDRDVYLQGPIWAKIPHTDGNFHPSPLMGGFGMKHPPPQILIKNTPVPADPPTAFNKDKLNSFITQYSTGQVSVEIEWELQKENSKRWNPEIQYTSNYYKSNNVEFAVNTEGVYSEPRPIGTRYLTRNL

SEQ ID NO: 1420 - protein, 736 aa, Artificial Sequence
  Description of Artificial Sequence: Synthetic polypeptide
MAADGYLPDWLEDNLSEGIREWWALKPGAPQPKANQQHQDNARGLVLPGYKYLGPGNGLDKGEPVNAADAAALEHDKAYDQQLKAGDNPYLKYNHADAEFQERLKEDTSFGGNLGRAVFQAKKRLLEPLGLVEEAAKTAPGKKRPVEQSPQEPDSSAGIGKSGAQPAKKRLNFGQTGDTESVPDPQPIGEPPAAPSGVGSLTMASGGGAPVADNNEGADGVGSSSGNWHCDSQWLGDRVITTSTRTWALPTYNNHLYKQISNSTSGGSSNDNAYFGYSTPWGYFDFNRFHCHFSPRDWQRLINNNWGFRPKRLNFKLFNIQVKEVTDNNGVKTIANNLTSTVQVFTDSDYQLPYVLGSAHEGCLPPFPADVFMIPQYGYLTLNDGSQAVGRSSFYCLEYFPSQMLRTGNNFQFSYEFENVPFHSSYAHSQSLDRLMNPLIDQYLYYLSRTINGSGQNQQTLKFSVAGPSNMAVQGRNYIPGPSYRQQRVSTTVTQNNNSEFAWPGASSWALNGRNSLMNPGPAMASHKEGEDRFFPLSGSLIFGKQGTGRDNVDADKVMITNEEEIKTTNPVATESYGQVATNHQSAQAQAQTGWVQNQGILPGMVWQDRDVYLQGPIWAKIPHTDGNFHPSPLMGGFGMKHPPPQILIKNTPVPADPPTAFNKDKLNSFITQYSTGQVSVEIEWELQKENSKRWNPEIQYTSNYYKSNNVEFAVNTEGVYSEPRPIGTRYLTRNL

SEQ ID NO: 1421 - protein, 534 aa, Artificial Sequence
  Description of Artificial Sequence: Synthetic polypeptide
MAEGGGGAMGDSSGGADGVGNASGNWHCDSQWMGNTVITKTTRTWVLPSYNNHIYKAITSGTSQDANVQYAGYSTPWGYFDFNRFHCHFSPRDWQRLINNHWGIRPKSLKFKIFNVQVKEVTTQDQTKTIANNLTSTIQVFTDDEHQLPYVLGSATEGTMPPFPSDVYALPQYGYCTMHTNQNGARFNDRSAFYCLEYFPSQMLRTGNNFEFTFDFEEVPFHSMFAHSQDLDRLMNPLVDQYLWNFNEVDSSRNAQFKKAVKGAYGTMGRNWLPGPKFLDQRVRAYTGGTDNYANWNIWSNGNKVNLKDRQYLLQPGPVSATYTEGEASSLPAQNILGIAKDPYRSGSTTAGISDIMVTEEQEVAPTNGVGWKPYGRTVTNEQNTTTAPTSSDLDVLGALPGMVWQNRDIYLQGPIGAKIPKTDGKFHPSPNLGGFGLHNPPPQVFIKNTPVPADPPVEYVHQKWNSYITQYSTGQCTVEMVWELRKENSKRWNPEIQFTSNFSNRTSIMFAPNETGGYVEDRLIGTRYLTQNL

SEQ ID NO: 1422 - protein, 554 aa, Artificial Sequence
  Description of Artificial Sequence: Synthetic polypeptide
MTSVNSAEASTGAGGGGSNPVKSMWSEGATFSANSVTCTFSRQFLIPYDPEHHYKVFSPAASSCHNASGKEAKVCTISPIMGYSTPWRYLDFNALNLFFSPLEFQHLIENYGSIAPDALTVTISEIAVKDVTDKTGGGVQVTDSTTGRLCMLVDHEYKYPYVLGQGQDTLAPELPIWVYFPPQYAYLTVGDVNTQGISGDSKKLASEESAFYVLEHSSFQLLGTGGTATMSYKFPPVPPENLEGCSQHFYEMYNPLYGSRLGVPDTLGGDPKFRSLTHEDHAIQPQNFMPGPLVNSVSTKEGDSFNTGAGKALTGLSTGTSQNTRISLRPGPVSQPYHHWDTDKYVTGINAISHGQTTYGNAEDKEYQQGVGRFPNEKEQLKQLQGLNMHTYFPNKGTQQYTDQIERPLMVGSVWNRRALHYESQLWSKIPNLDDSFKTQFAALGGWGLHQPPPQIFLKILPQSGPIGGIKSMGITTLVQYAVGIMTVTMTFKLGPRKATGRWNPQPGVYPPHAAGHLPYVLYDPTATDAKQHHRHGYEKPEELWTAKSRVHPL

SEQ ID NO: 1423 - protein, 587 aa, Artificial Sequence
  Description of Artificial Sequence: Synthetic polypeptide
MSDGTSQPDGGNAVHSAARVERAADGPGGSGGGGSGGGGVGVSTGSYDNQTHYRFLGDGWVEITALATRLVHLNMPKSENYCRIRVHNTTDTSVKGNMAKDDAHEQIWTPWSLVDANAWGVWLQPSDWQYICNTMSQLNLVSLDQEIFNVVLKTVTEQDSGGQAIKIYNNDLTACMMVAVDSNNILPYTPAANSMETLGFYPWKPTIASPYRYYFCVDRDLSVTYENQEGTIEHNVMGTPKGMNSQFFTIENTQQITLLRTGDEFATGTYYFDTNPVKLTHTWQTNRQLGQPPLLSTFPEADTDAGTLTAQGSRHGATQMEVNWVSEAIRTRPAQVGFCQPHNDFEASRAGPFAAPKVPADVTQGMDREANGSVRYSYGKQHGENWAAHGPAPERYTWDETNFGSGRDTRDGFIQSAPLVVPPPLNGILTNANPIGTKNDIHFSNVFNSYGPLTTFSHPSPVYPQGQIWDKELDLEHKPRLHITAPFVCKNNAPGQMLVRLGPNLTDQYDPNGATLSRIVTYGTFFWKGKLTMRAKLRANTTWNPVYQVSVEDNGNSYMSVTKWLPTATGNMQSVPLITRPVARNTY

SEQ ID NO: 1424 - protein, 584 aa, Artificial Sequence
  Description of Artificial Sequence: Synthetic polypeptide
MSDGAVQPDGGQPAVRNERATGSGNGSGGGGGGGSGGVGISTGTFNNQTEFKFLENGWVEITANSSRLVHLNMPESENYKRVVVNNMDKTAVKGNMALDDIHVEIVTPWSLVDANAWGVWFNPGDWQLIVNTMSELHLVSFEQEIFNVVLKTVSESATQPPTKVYNNDLTASLMVALDSNNTMPFTPAAMRSETLGFYPWKPTIPTPWRYYFQWDRTLIPSHTGTSGTPTNVYHGTDPDDVQFYTIENSVPVHLLRTGDEFATGTFFFDCKPCRLTHTWQTNRALGLPPFLNSLPQSEGATNFGDIGVQQDKRRGVTQMGNTDYITEATIMRPAEVGYSAPYYSFEASTQGPFKTPIAAGRGGAQTDENQAADGDPRYAFGRQHGQKTTTTGETPERFTYIAHQDTGRYPEGDWIQNINFNLPVTNDNVLLPTDPIGGKTGINYTNIFNTYGPLTALNNVPPVYPNGQIWDKEFDTDLKPRLHINAPFVCQNNCPGQLFVKVAPNLTNQYDPDASANMSRIVTYSDFWWKGKLVFKAKLRASHTWNPIQQMSINVDNQFNYVPNNIGAMKIVYEKSQLAPRKLY

SEQ ID NO: 1425 - protein, 548 aa, Artificial Sequence
  Description of Artificial Sequence: Synthetic polypeptide
GVGISTGTFNNQTEFKFLENGWVEITANSSRLVHLNMPESENYRRVVVNNMDKTAVNGNMALDDIHAQIVTPWSLVDANAWGVWFNPGDWQLIVNTMSELHLVSFEQEIFNVVLKTVSESATQPPTKVYNNDLTASLMVALDSNNTMPFTPAAMRSETLGFYPWKPTIPTPWRYYFQWDRTLIPSHTGTSGTPTNIYHGTDPDDVQFYTIENSVPVHLLRTGDEFATGTFFFDCKPCRLTHTWQTNRALGLPPFLNSLPQSEGATNFGDIGVQQDKRRGVTQMGNTNYITEATIMRPAEVGYSAPYYSFEASTQGPFKTPIAAGRGGAQTDENQAADGNPRYAFGRQHGQKTTTTGETPERFTYIAHQDTGRYPEGDWIQNINFNLPVTNDNVLLPTDPIGGKTGINYTNIFNTYGPLTALNNVPPVYPNGQIWDKEFDTDLKPRLHVNAPFVCQNNCPGQLFVKVAPNLTNEYDPDASANMSRIVTYSDFWWKGKLVFKAKLRASHTWNPIQQMSINVDNQFNYVPSNIGGMKIVYEKSQLAPRKLY

SEQ ID NO: 1426 - protein, 736 aa, Artificial Sequence; identical to SEQ ID NO: 101
  Description of Artificial Sequence: Synthetic polypeptide

SEQ ID NO: 1427 - protein, 736 aa, Artificial Sequence; identical to SEQ ID NO: 96
  Description of Artificial Sequence: Synthetic polypeptide

SEQ ID NO: 1428 - protein, 736 aa, Artificial Sequence
  Description of Artificial Sequence: Synthetic polypeptide
MAADGYLPDWLEDTLSEGIRQWWKLKPGPPPPKPAERHKDDSRGLVLPGYKYLGPFNGLDKGEPVNEADAAALEHDKAYDRQLDSGDNPYLKYNHADAEFQERLKEDTSFGGNLGRAVFQAKKRVLEPLGLVEEPVKTAPGKKRPVEHSPVEEPDSSSGTGKAGQQPARKRLNFGQTGDADSVPDPQPLGQPPAAPSGLGTNTMATGSGAPMADNNEGADGVGNSSGNWHCDSTWMGDRVITTSTRTWALPTYNNHLYKQISSQSGASNDNHYFGYSTPWGYFDFNRFHCHFSPRDWQRLINNNWGFRPKRLNFKLFNIQVKEVTQNDGTTTIANNLTSTVQVFTDSEYQLPYVLGSAHQGCLPPFPADVFMVPQYGYLTLNNGSQAVGRSSFYCLEYFPSQMLRTGNNFTFSYTFEDVPFHSSYAHSQSLDRLMNPLIDQYLYYLSRTNTPSGTTTQSRLQFSQAGASDIRDQSRNWLPGPCYRQQRVSKTSADNNNSEYSWTGATKYHLNGRDSLVNPGPAMASHKDDEEKFFPQSGVLIFGKQGSEKTNVDIEKVMITDEEEIRTTNPVATEQYGSVSTNLQRGNRQAATADVNTQGVLPGMVWQDRDVYLQGPIWAKIPHTDGHFHPSPLMGGFGLKHPPPQILIKNTPVPANPSTTFSAAKFASFITQYSTGQVSVEIEWELQKENSKRWNPEIQYTSNYNKSVNVDFTVDTNGVYSEPRPIGTRYLTRNL

SEQ ID NO: 1429 - protein, 736 aa, Artificial Sequence
  Description of Artificial Sequence: Synthetic polypeptide
MAADGYLPDWLEDNLSEGIREWWDLKPGAPKPKANQQKQDDGRGLVLPGYKYLGPFNGLDKGEPVNAADAAALEHDKAYDQQLKAGDNPYLRYNHADAEFQERLQEDTSFGGNLGRAVFQAKKRVLEPFGLVEEGAKTAPGKKRPVEQSPQEPDSSSGIGKTGQQPAKKRLNFGQTGDSESVPDPQPLGEPPATPAAVGPTTMASGGGAPMADNNEGADGVGNASGNWHCDSTWLGDRVITTSTRTWALPTYNNHLYKQISSASTGASNDNHYFGYSTPWGYFDFNRFHCHFSPRDWQRLINNNWGFRPKRLNFKLFNVQVKEVTTNDGVTTIANNLTSTVQVFSDSEYQLPYVLGSAHQGCLPPFPADVFMIPQYGYLTLNNGSQAVGRSSFYCLEYFPSQMLRTGNNFTFSYTFEDVPFHSSYAHSQSLDRLMNPLIDQYLYYLNRTQDQSGSAQNKDLLFSRGSPAGMSVQPKNWLPGPCYRQQRVSKTKTDNNNSNFTWTGASKYNLNGRESIINPGTAMASHKDDKNKFFPMSGVMIFGKESAGASNTALDNVMITDEEEIKATNPVATERFGTVAVNLQSSSTDPATGDVHVMGALPGMVWQDRDVYLQGPIWAKIPHTDGHFHPSPLMGGFGLKNPPPQILIKNTPVPANPPAEFSATKFASFITQYSTGQVSVEIEWELQKENSKRWNPEVQYTSNYAKSANVDFTVDNNGLYTEPRPIGTRYLTRPL

SEQ ID NO: 1430 - protein, 737 aa, Artificial Sequence
  Description of Artificial Sequence: Synthetic polypeptide
MAADGYLPDWLEDTLSEGIRQWWKLKPGPPPPKPAERHKDDSRGLVLPGYKYLGPGNGLDKGEPVNAADAAALEHDKAYDQQLKAGDNPYLKYNHADAEFQERLKEDTSFGGNLGRAVFQAKKRVLEPLGLVEEGAKTAPGKKRPVEPSPQRSPDSSTGIGKKGQQPARKRLNFGQTGDSESVPDPQPLGEPPATPAAVGPTTMASGGGAPMADNNEGADGVGNASGNWHCDSTWLGDRVITTSTRTWALPTYNNHLYKQISSASTGASNDNHYFGYSTPWGYFDFNRFHCHFSPRDWQRLINNNWGFRPKRLNFKLFNIQVKEVTTNDGVTTIANNLTSTVQVFSDSEYQLPYVLGSAHQGCLPPFPADVFMIPQYGYLTLNNGSQAVGRSSFYCLEYFPSQMLRTGNNFTFSYTFEDVPFHSSYAHSQSLDRLMNPLIDQYLYYLNRTQNQSGSAQNKDLLFSRGSPAGMSVQPKNWLPGPCYRQQRVSKTKTDNNNSNFTWTGASKYNLNGRESIINPGTAMASHKDDKDKFFPMSGVMIFGKESAGASNTALDNVMITDEEEIKATNPVATERFGTVAVNLQSSSTDPATEDVHVMGALPGMVWQDRDVYLQGPIWAKIPHTDGHFHPSPLMGGFGLKNPPPQILIKNTPVPANPPAEFSATKFASFITQYSTGQVSVEIEWELQKENSKRWNPEVQYTSNYAKSANVDFTVDNNGLYTEPRPIGTRYLTRNL

SEQ ID NO: 1431 - protein, 736 aa, Artificial Sequence
  Description of Artificial Sequence: Synthetic polypeptide
MAADGYLPDWLEDNLSEGIREWWDLKPGAPKPKANQQKQDDGRGLVLPGYKYLGPFNGLDKGEPVNAADAAALEHDKAYDQQLKAGDNPYLRYNHADAEFQERLQEDTSFGGNLGRAVFQAKKRVLEPFGLVEEGAKTAPGKKRPVEQSPQEPDSSSGIGKTGQQPAKKRLNFGQTGDSESVPDPQPLGEPPATPAAVGPTTMASGGGAPMADNNEGADGVGNASGNWHCDSTWLGDRVITTSTRTWALPTYNNHLYKQISSASTGASNDNHYFGYSTPWGYFDFNRFHCHFSPRDWQRLINNNWGFRPKRLNFKLFNVQVKEVTTNDGVTTIANNLTSTVQVFSDSEYQLPYVLGSAHQGCLPPFPADVFMIPQYGYLTLNNGSQAVGRSSFYCLEYFPSQMLRTGNNFTFSYTFEDVPFHSSYAHSQSLDRLMNPLIDQYLYYLNRTQDQSGSAQNKDLLFSRGSPAGMSVQPKNWLPGPCYRQQRVSKTKTDNNNSNFTWTGASKYNLNGRESIINPGTAMASHKDDKNKFFPMSGVMIFGKESAGASNTALDNVMITDEEEIKATNPVATERFGTVAVNLQSSSTDPATGDVHVMGALPGMVWQDRDVYLQGPIWAKIPHTDGHFHPSPLMGGFGLKHPPPQILIKNTPVPANPPAEFSATKFASFITQYSTGQVSVEIEWELQKENSKRWNPEVQYTSNYAKSANVDFTVDNNGLYTEPRPIGTRYLTRPL

SEQ ID NO: 1432 - protein, 736 aa, Artificial Sequence
  Description of Artificial Sequence: Synthetic polypeptide
MAADGYLPDWLEDNLSEGIREWWDLKPGAPKPKANQQKQDDGRGLVLPGYKYLGPFNGLDKGEPVNAADAAALEHDKAYDQQLKAGDNPYLRYNHADAEFQERLQEDTSFGGNLGRAVFQAKKRVLEPFGLVEEGAKTAPGKKRPVEQSPQEPDSSSGIGKTGQQPAKKRLNFGQTGDSESVPDPQPLGEPPATPAAVGPTTMASGGGAPMADNNEGADGVGNASGNWHCDSTWLGDRVITTSTRTWALPTYNNHLYKQISSASTGASNDNHYFGYSTPWGYFDFNRFHCHFSPRDWQRLINNNWGFRPKRLNFKLFNVQVKEVTTNDGVTTIANNLTSTVQVFSDSEYQLPYVLGSAHQGCLPPFPADVFMIPQYGYLTLNNGSQAVGRSSFYCLEYFPSQMLRTGNNFTFSYTFEDVPFHSSYAHSQSLDRLMNPLIDQYLYYLNRTQDQSGSAQNKDLLFSRGSPAGMSVQPKNWLPGPCYRQQRVSKTKTDNNNSNFTWTGASKYNLNGRESIINPGTAMASHKDDKDKFFPMSGVMIFGKESAGASNTALDNVMITDEEEIKATNPVATERFGTVAVNLQSSSTDPATGDVHVMGALPGMVWQDRDVYLQGPIWAKIPHTDGHFHPSPLMGGFGLKHPPPQILIKNTPVPANPPAEFSATKFASFITQYSTGQVSVEIEWELQKENSKRWNPEVQYTSNYAKSANVDFTVDNNGLYTEPRPIGTRYLTRPL

SEQ ID NO: 1433 - protein, 736 aa, Artificial Sequence
  Description of Artificial Sequence: Synthetic polypeptide
MAADGYLPDWLEDNLSEGIREWWDLKPGAPKPKANQQKQDDGRGLVLPGYKYLGPFNGLDKGEPVNAADAAALEHDKAYDQQLKAGDNPYLRYNHADAEFQERLQEDTSFGGNLGRAVFQAKKRVLEPFGLVEEGAKTAPGKKRPVEQSPQEPDSSSGIGKTGQQPAKKRLNFGQTGDSESVPDPQPLGEPPATPAAVGPTTMASGGGAPMADNNEGADGVGNASGNWHCDSTWLGDRVITTSTRTWALPTYNNHLYKQISSASTGASNDNHYFGYSTPWGYFDFNRFHCHFSPRDWQRLINNNWGFRPKRLNFKLFNIQVKEVTTNDGVTTIANNLTSTVQVFSDSEYQLPYVLGSAHQGCLPPFPADVFMIPQYGYLTLNNGSQAVGRSSFYCLEYFPSQMLRTGNNFTFSYTFEDVPFHSSYAHSQSLDRLMNPLIDQYLYYLNRTQDQSGSAQNKDLLFSRGSPAGMSVQPKNWLPGPCYRQQRVSKTKTDNNNSNFTWTGASKYNLNGRESIINPGTAMASHKDDKNKFFPMSGVMIFGKESAGASNTALDNVMITDEEEIKATNPVATERFGTVAVNLQSSSTDPATGDVHVMGALPGMVWQDRDVYLQGPIWAKIPHTDGHFHPSPLMGGFGLKHPPPQILIKNTPVPANPPAEFSATKFASFITQYSTGQVSVEIEWELQKENSKRWNPEVQYTSNYAKSANVDFTVDNNGLYTEPRPIGTRYLTRPL

SEQ ID NO: 1434 - protein, 736 aa, Artificial Sequence
  Description of Artificial Sequence: Synthetic polypeptide
MAADGYLPDWLEDNLSEGIREWWDLKPGAPKPKANQQKQDDGRGLVLPGYKYLGPFNGLDKGEPVNAADAAALEHDKAYDQQLKAGDNPYLRYNHADAEFQERLQEDTSFGGNLGRAVFQAKKRVLEPFGLVEEGAKTAPGKKRPVEQSPQEPDSSSGIGKTGQQPAKKRLNFGQTGDSESVPDPQPLGEPPATPAAVGPTTMASGGGAPMADNNEGADGVGNASGNWHCDSTWLGDRVITTSTRTWALPTYNNHLYKQISSASTGASNDNHYFGYSTPWGYFDFNRFHCHFSPRDWQRLINNNWGFRPKRLNFKLFNVQVKEVTTNDGVTTIANNLTSTVQVFSDSEYQLPYVLGSAHQGCLPPFPADVFMIPQYGYLTLNNGSQAVGRSSFYCLEYFPSQMLRTGNNFTFSYTFEDVPFHSSYAHSQSLDRLMNPLIDQYLYYLNRTQNQSGSAQNKDLLFSRGSPAGMSVQPKNWLPGPCYRQQRVSKTKTDNNNSNFTWTGASKYNLNGRESIINPGTAMASHKDDKDKFFPMSGVMIFGKESAGASNTALDNVMITDEEEIKATNPVATERFGTVAVNLQSSSTDPATGDVHVMGALPGMVWQDRDVYLQGPIWAKIPHTDGHFHPSPLMGGFGLKHPPPQILIKNTPVPANPPAEFSATKFASFITQYSTGQVSVEIEWELQKENSKRWNPEVQYTSNYAKSANVDFTVDNNGLYTEPRPIGTRYLTRPL

SEQ ID NO: 1435 - protein, 736 aa, Artificial Sequence
  Description of Artificial Sequence: Synthetic polypeptide
MAADGYLPDWLEDNLSEGIREWWDLKPGAPKPKANQQKQDDGRGLVLPGYKYLGPFNGLDKGEPVNAADAAALEHDKAYDQQLKAGDNPYLRYNHADAEFQERLQEDTSFGGNLGRAVFQAKKRVLEPFGLVEEGAKTAPGKKRPVEQSPQEPDSSSGIGKTGQQPAKKRLNFGQTGDSESVPDPQPLGEPPATPAAVGPTTMASGGGAPMADNNEGADGVGNASGNWHCDSTWLGDRVITTSTRTWALPTYNNHLYKQISSASTGASNDNHYFGYSTPWGYFDFNRFHCHFSPRDWQRLINNNWGFRPKRLNFKLFNVQVKEVTTNDGVTTIANNLTSTVQVFSDSEYQLPYVLGSAHQGCLPPFPADVFMIPQYGYLTLNNGSQAVGRSSFYCLEYFPSQMLRTGNNFTFSYTFEDVPFHSSYAHSQSLDRLMNPLIDQYLYYLNRTQNQSGSAQNKDLLFSRGSPAGMSVQPKNWLPGPCYRQQRVSKTKTDNNNSNFTWTGASKYNLNGRESIINPGTAMASHKDDKNKFFPMSGVMIFGKESAGASNTALDNVMITDEEEIKATNPVATERFGTVAVNLQSSSTDPATGDVHVMGALPGMVWQDRDVYLQGPIWAKIPHTDGHFHPSPLMGGFGLKHPPPQILIKNTPVPANPPAEFSATKFASFITQYSTGQVSVEIEWELQKENSKRWNPEVQYTSNYAKSANVDFTVDNNGLYTEPRPIGTRYLTRPL

SEQ ID NO: 1436 - DNA, 2217 bp, Artificial Sequence
  Description of Artificial Sequence: Synthetic polynucleotide
atggctgccgatggttatcttccagattggctcgaggacaacctctctgagggcattcgcgagtggtgggacctgaaacctggagccccgaaacccaaagccaaccagcaaaagcaggacaacggccggggtctggtgcttcctggctacaagtacctcggacccttcaacggactcgacaagggggagcccgtcaacgcggcggacgcagcggccctcgagcacgacaaggcctacgaccagcagctccaagcgggtgacaatccgtacctgcggtataatcacgccgacgccgagtttcaggagcgtctgcaagaagatacgtcttttgggggcaacctcgggcgcgcagtcttccaggccaaaaagcgggttctcgaacctctgggcctggttgaatcgccggttaagacggctcctggaaagaagagaccggtagagccatcaccccagcgctctccagactcctctacgggcatcggcaagaaaggccagcagcccgcaaaaaagagactcaattttgggcagactggcgactcagagtcagtccccgaccctcaaccaatcggagaaccaccagcaggcccctctggtctgggatctggtacaatggctgcaggcggtggcgctccaatggcagacaataacgaaggcgccgacggagtgggtagttcctcaggaaattggcattgcgattccacatggctgggcgacagagtcatcaccaccagcacccgcacctgggccctgcccacctacaacaaccacctctacaagcaaatctccaacgggacctcgggaggaagcaccaacgacaacacctacttcggctacagcaccccctgggggtattttgacttcaacagattccactgccacttttcaccacgtgactggcagcgactcatcaacaacaactggggattccggcccaagaggctcaacttcaagctcttcaacatccaagtcaaggaggtcacgcagaatgaaggcaccaagaccatcgccaataaccttaccagcacgattcaggtctttacggactcggaataccagctcccgtacgtgctcggctcggcgcaccagggctgcctgcctccgttcccggcggacgtcttcatgattcctcagtacgggtacctgactctgaacaatggcagtcaggctgtgggccggtcgtccttctactgcctggagtactttccttctcaaatgctgagaacgggcaacaactttgaattcagctacaacttcgaggacgtgcccttccacagcagctacgcgcacagccagagcctggaccggctgatgaaccctctcatcgaccagtacttgtactacctgtcccggactcaaagcacgggcggtactgcaggaactcagcagttgctattttctcaggccgggcctaacaacatgtcggctcaggccaagaactggctacccggtccctgctaccggcagcaacgcgtctccacgacactgtcgcagaacaacaacagcaactttgcctggacgggtgccaccaagtatcatctgaatggcagagactctctggtgaatcctggcgttgccatggctacccacaaggacgacgaagagcgattttttccatccagcggagtcttaatgtttgggaaacagggagctggaaaagacaacgtggactatagcagcgtgatgctaaccagcgaggaagaaataaagaccaccaacccagtggccacagaacagtacggcgtggtggccgataacctgcaacagcaaaacgccgctcctattgtaggggccgtcaatagtcaaggagccttacctggcatggtgtggcagaaccgggacgtgtacctgcagggtcccatctgggccaagattcctcatacggacggcaactttcatccctcgccgctgatgggaggctttggactgaagcatccgcctcctcagatcctgattaaaaacacacctgttcccgcggatcctccgaccaccttcaatcaggccaagctggcttctttcatcacgcagtacagtaccggccaggtcagcgtggagatcgagtgggagctgcagaaggagaacagcaaacgctggaacccagagattcagtacacttccaactactacaaatctacaaatgtggactttgctgtcaatactgagggtacttattccgagcctcgccccattggcacccgttacctcacccgtaatctgtaa

SEQ ID NO: 1437 - protein, 738 aa, Artificial Sequence
  Description of Artificial Sequence: Synthetic polypeptide
MAADGYLPDWLEDNLSEGIREWWDLKPGAPKPKANQQKQDNGRGLVLPGYKYLGPFNGLDKGEPVNAADAAALEHDKAYDQQLQAGDNPYLRYNHADAEFQERLQEDTSFGGNLGRAVFQAKKRVLEPLGLVESPVKTAPGKKRPVEPSPQRSPDSSTGIGKKGQQPAKKRLNFGQTGDSESVPDPQPIGEPPAGPSGLGSGTMAAGGGAPMADNNEGADGVGSSSGNWHCDSTWLGDRVITTSTRTWALPTYNNHLYKQISNGTSGGSTNDNTYFGYSTPWGYFDFNRFHCHFSPRDWQRLINNNWGFRPKRLNFKLFNIQVKEVTQNEGTKTIANNLTSTIQVFTDSEYQLPYVLGSAHQGCLPPFPADVFMIPQYGYLTLNNGSQAVGRSSFYCLEYFPSQMLRTGNNFEFSYNFEDVPFHSSYAHSQSLDRLMNPLIDQYLYYLSRTQSTGGTAGTQQLLFSQAGPNNMSAQAKNWLPGPCYRQQRVSTTLSQNNNSNFAWTGATKYHLNGRDSLVNPGVAMATHKDDEERFFPSSGVLMFGKQGAGKDNVDYSSVMLTSEEEIKTTNPVATEQYGVVADNLQQQNAAPIVGAVNSQGALPGMVWQNRDVYLQGPIWAKIPHTDGNFHPSPLMGGFGLKHPPPQILIKNTPVPADPPTTFNQAKLASFITQYSTGQVSVEIEWELQKENSKRWNPEIQYTSNYYKSTNVDFAVNTEGTYSEPRPIGTRYLTRNL

SEQ ID NO: 1438 - protein, 738 aa, Artificial Sequence; identical to SEQ ID NO: 1437
  Description of Artificial Sequence: Synthetic polypeptide

SEQ ID NO: 1439 - DNA, 4472 bp, Artificial Sequence
  Description of Artificial Sequence: Synthetic polynucleotide
ctccatcactaggggtaaccgcgaagcgcctcccacgctgccgcgtcagcgctgacgtaaattacgtcataggggagtggtcctgtattagctgtcacgtgagtgcttttgcgacattttgcgacaccacgtggccattcatggtatatatggccgagtgagcgagcaggatctccattttgaccgcgaaatttgaacgagcagcagccatgccgggcttctacgagatcgtgcttaaggtgccgagcgacctggacgagcacctgccgggcatttctgactcgtttgtgaactgggtggcagagaaggaatgggagctgcccccggattctgacatggatcggaatctgattgagcaggcacccctgaccgtggccgagaagctacagcgcgacttcctggtccaatggcgccgcgtgagtaaggccccggaggccctcttctttgttcagttcgagaagggcgagtcctacttccacctccatattctggtagagaccacgggggtcaaatccatggtgctgggccgcttcctgagtcagattcgggacaagctggtgcagaccatctaccgcgggatcgagccgaccctgcccaactggttcgcggtgacaaagacgcgtaatggcgccggaggggggaacaaggtggtggacgagtgctacatccccaactacctgctgcccaagactcagcccgagctgcagtgggcgtggactaacatggaggagtatataagcgcgtgcttgaacctggccgagcgcaaacggctcgtggcgcagcacctgacccacgtcagccagacccaggagcagaacaaggagaatctgaacccgaattctgacgcgcctgtcatccggtcaaaaacctccgcgcgctacatggagctggtcgggtggctggtggaccggggcatcacctccgagaagcagtggatccaggaggaccaggcctcgtacatctccttcaacgccgcctccaactcgcggtctcagatcaaggccgcgctggacaatgccggcaagatcatggcgctgaccaaatccgcgcccgactacctggtaggccccgctctgcccgcggacattaaatccaaccgcatctaccgcatcctggagctgaatggctacgaccctgcctacgccggttccgtctttctcggctgggcccagaaaaagtttggcaaaaggaacaccatctggctgtttgggccggccaccacgggcaagaccaacatcgcggaagccatcgcccacgccgtgcccttctacggctgcgtcaactggaccaatgagaactttcccttcaacgattgcgtcgacaagatggtgatctggtgggaggagggcaagatgacggccaaggtcgtggagtccgccaaggccattctcggcggcagcaaggtgcgcgtggaccaaaagtgcaagtcgtccgcccagatcgatcccacccccgtgatcgtcacctccaacaccaacatgtgcgccgtgattgacgggaacagcaccaccttcgagcaccagcagccgttgcaggaccggatgttcaaatttgaacttacccgccgtctggagcacgactttggcaaggtgacaaagcaggaagtcaaagagttcttccgctgggcgcaggatcacgtgaccgaggtggcgcatgagttctacgtcagaaagggtggagctaacaaaagacccgcccccgatgacgcggatataagcgagcccaagcgggcctgcccctcagtcgcggatccatcgacgtcagacgcggaaggagctccggtggactttgccgacaggtaccaaaacaaatgttctcgtcacgcgggcatgcttcagatgctgtttccctgcaaaacatgcgagagaatgaatcagaatttcaacatttgcttcacgcacgggaccagagactgttcagaatgtttccctggcgtgtcagaatctcaaccggtcgtcagaaaaaagacgtatcggaaactctgtgcgattcatcatctgctggggcgggcacccgagattgcttgctcggcctgcgacctggtcaacgtggacctggatgactgtgtttctgagcaataaatgacttaaaccaggtatggctgccgatggttatcttccagattggctcgaggacaacctctctgagggcattcgcgagtggtgggacctgaaacctggagccccgaaacccaaagccaaccagcaaaagcaggacaacggccggggtctggtgcttcctggctacaagtacctcggacccttcaacggactcgacaagggggagcccgtcaacgcggcggacgcagcggccctcgagcacgacaaggcctacgaccagcagctccaagcgggtgacaatccgtacctgcggtataatcacgccgacgccgagtttcaggagcgtctgcaagaagatacgtcttttgggggcaacctcgggcgcgcagtcttccaggccaaaaagcgggttctcgaacctctgggcctggttgaatcgccggttaagacggctcctggaaagaagagaccggtagagccatcaccccagcgctctccagactcctctacgggcatcggcaagaaaggccagcagcccgcaaaaaagagactcaattttgggcagactggcgactcagagtcagtccccgaccctcaaccaatcggagaaccaccagcaggcccctctggtctgggatctggtacaatggctgcaggcggtggcgctccaatggcagacaataacgaaggcgccgacggagtgggtagttcctcaggaaattggcattgcgattccacatggctgggcgacagagtcatcaccaccagcacccgcacctgggccctgcccacctacaacaaccacctctacaagcaaatctccaacgggacctcgggaggaagcaccaacgacaacacctacttcggctacagcaccccctgggggtattttgacttcaacagattccactgccacttttcaccacgtgactggcagcgactcatcaacaacaactggggattccggcccaagaggctcaacttcaagctcttcaacatccaagtcaaggaggtcacgcagaatgaaggcaccaagaccatcgccaataaccttaccagcacgattcaggtctttacggactcggaataccagctcccgtacgtgctcggctcggcgcaccagggctgcctgcctccgttcccggcggacgtcttcatgattcctcagtacgggtacctgactctgaacaatggcagtcaggctgtgggccggtcgtccttctactgcctggagtactttccttctcaaatgctgagaacgggcaacaactttgaattcagctacaacttcgaggacgtgcccttccacagcagctacgcgcacagccagagcctggaccggctgatgaaccctctcatcgaccagtacttgtactacctgtcccggactcaaagcacgggcggtactgcaggaactcagcagttgctattttctcaggccgggcctaacaacatgtcggctcaggccaagaactggctacccggtccctgctaccggcagcaacgcgtctccacgacactgtcgcagaacaacaacagcaactttgcctggacgggtgccaccaagtatcatctgaatggcagagactctctggtgaatcctggcgttgccatggctacccacaaggacgacgaagagcgattttttccatccagcggagtcttaatgtttgggaaacagggagctggaaaagacaacgtggactatagcagcgtgatgctaaccagcgaggaagaaataaagaccaccaacccagtggccacagaacagtacggcgtggtggccgataacctgcaacagcaaaacgccgctcctattgtaggggccgtcaatagtcaaggagccttacctggcatggtgtggcagaaccgggacgtgtacctgcagggtcccatctgggccaagattcctcatacggacggcaactttcatccctcgccgctgatgggaggctttggactgaagcatccgcctcctcagatcctgattaaaaacacacctgttcccgcggatcctccgaccaccttcaatcaggccaagctggcttctttcatcacgcagtacagtaccggccaggtcagcgtggagatcgagtgggagctgcagaaggagaacagcaaacgctggaacccagagattcagtacacttccaactactacaaatctacaaatgtggactttgctgtcaatactgagggtacttattccgagcctcgccccattggcacccgttacctcacccgtaatctgtaattacatgttaatcaataaaccggttaattcgtttcagttgaactttggtctcctgtccttcttatcttatcggttaccatagaaactggttacttattaactgcttggtgcgcttcgcgataaaagacttacgtcatcgggttacccctagtgatgga

SEQ ID NO: 1440 - protein, 738 aa, Artificial Sequence
  Description of Artificial Sequence: Synthetic polypeptide
MAADGYLPDWLEDNLSEGIREWWDLKPGAPKPKANQQKQDNGRGLVLPGYKYLGPFNGLDKGEPVNAADAAALEHDKAYDQQLQAGDNPYLRYNHADAEFQERLQEDTSFGGNLGRAVFQAKKRVLEPLGLVESPVKTAPGKKRPVEPSPQRSPDSSTGIGKKGQQPAKKRLNFGQTGDSESVPDPQPIGEPPAAPSGVGPNTMAAGGGAPMADNNEGADGVGSSSGNWHCDSTWLGDRVITTSTRTWALPTYNNHLYKQISNGTSGGSTNDNTYFGYSTPWGYFDFNRFHCHFSPRDWQRLINNNWGFRPKRLNFKLFNIQVKEVTQNEGTKTIANNLTSTIQVFTDSEYQLPYVLGSAHQGCLPPFPADVFMIPQYGYLTLNNGSQAVGRSSFYCLEYFPSQMLRTGNNFEFSYNFEDVPFHSSYAHSQSLDRLMNPLIDQYLYYLSRTQSTGGTAGTQQLLFSQAGPNNMSAQAKNWLPGPCYRQQRVSTTLSQNNNSNFAWTGATKYHLNGRDSLVNPGVAMATHKDDEERFFPSSGVLMFGKQGAGKDNVDYSSVMLTSEEEIKTTNPVATEQYGVVADNLQQQNAAPIVGAVNSQGALPGMVWQNRDVYLQGPIWAKIPHTDGNFHPSPLMGGFGLKHPPPQILIKNTPVPADPPTTFNQAKLASFITQYSTGQVSVEIEWELQKENSKRWNPEIQYTSNYYKSTNVDFAVNTEGTYSEPRPIGTRYLTRNL

SEQ ID NO: 1441 - protein, 738 aa, Artificial Sequence
  Description of Artificial Sequence: Synthetic polypeptide
MAADGYLPDWLEDNLSEGIREWWDLKPGAPKPKANQQRQDNGRGLVLPGYRYLGPFNGLDKGEPVNAADAAALEHDRAYDQQLQAGDNPYLRYNHADAEFQERLQEDTSFGGNLGRAVFQAKKRVLEPLGLVESPVRTAPGKKRPVEPSPQRSPDSSTGIGKKGQQPARKRLNFGQTGDSESVPDPQPIGEPPAAPSGVGPNTMAAGGGAPMADNNEGADGVGSSSGNWHCDSTWLGDRVITTSTRTWALPTYNNHLYRQISNGTSGGSTNDNTYFGYSTPWGYFDFNRFHCHFSPRDWQRLINNNWGFRPKRLNFKLFNIQVKEVTQNEGTRTIANNLTSTIQVFTDSEYQLPYVLGSAHQGCLPPFPADVFMIPQYGYLTLNNGSQAVGRSSFYCLEYFPSQMLRTGNNFEFSYNFEDVPFHSSYAHSQSLDRLMNPLIDQYLYYLSRTQSTGGTAGTQQLLFSQAGPNNMSAQAKNWLPGPCYRQQRVSTTLSQNNNSNFAWTGATKYHLNGRDSLVNPGVAMATHRDDEERFFPSSGVLMFGRQGAGRDNVDYSSVMLTSEEEIRTTNPVATEQYGVVADNLQQQNAAPIVGAVNSQGALPGMVWQNRDVYLQGPIWAKIPHTDGNFHPSPLMGGFGLKHPPPQILIKNTPVPADPPTTFNQAKLASFITQYSTGQVSVEIEWELQKENSKRWNPEIQYTSNYYKSTNVDFAVNTEGTYSEPRPIGTRYLTRNL

SEQ ID NO: 1442 - protein, 738 aa, Artificial Sequence
  Description of Artificial Sequence: Synthetic polypeptide
MAADGYLPDWLEDNLSEGIREWWDLKPGAPKPKANQQRQDNGRGLVLPGYRYLGPFNGLDKGEPVNAADAAALEHDRAYDQQLQAGDNPYLRYNHADAEFQERLQEDTSFGGNLGRAVFQAKKRVLEPLGLVESPVRTAPGKKRPVEPSPQRSPDSSTGIGKRGQQPARKRLNFGQTGDSESVPDPQPIGEPPAAPSGVGPNTMAAGGGAPMADNNEGADGVGSSSGNWHCDSTWLGDRVITTSTRTWALPTYNNHLYRQISNGTSGGSTNDNTYFGYSTPWGYFDFNRFHCHFSPRDWQRLINNNWGFRPKRLNFKLFNIQVKEVTQNEGTRTIANNLTSTIQVFTDSEYQLPYVLGSAHQGCLPPFPADVFMIPQYGYLTLNNGSQAVGRSSFYCLEYFPSQMLRTGNNFEFSYNFEDVPFHSSYAHSQSLDRLMNPLIDQYLYYLSRTQSTGGTAGTQQLLFSQAGPNNMSAQAKNWLPGPCYRQQRVSTTLSQNNNSNFAWTGATKYHLNGRDSLVNPGVAMATHRDDEERFFPSSGVLMFGKQGAGRDNVDYSSVMLTSEEEIRTTNPVATEQYGVVADNLQQQNAAPIVGAVNSQGALPGMVWQNRDVYLQGPIWAKIPHTDGNFHPSPLMGGFGLKHPPPQILIKNTPVPADPPTTFNQAKLASFITQYSTGQVSVEIEWELQKENSKRWNPEIQYTSNYYKSTNVDFAVNTEGTYSEPRPIGTRYLTRNL

SEQ ID NO: 1443 - protein, 738 aa, Artificial Sequence
  Description of Artificial Sequence: Synthetic polypeptide
MAADGYLPDWLEDNLSEGIREWWDLKPGAPKPKANQQRQDNGRGLVLPGYRYLGPFNGLDKGEPVNAADAAALEHDRAYDQQLQAGDNPYLRYNHADAEFQERLQEDTSFGGNLGRAVFQAKKRVLEPLGLVESPVRTAPGKKRPVEPSPQRSPDSSTGIGKRGQQPAKKRLNFGQTGDSESVPDPQPIGEPPAAPSGVGPNTMAAGGGAPMADNNEGADGVGSSSGNWHCDSTWLGDRVITTSTRTWALPTYNNHLYRQISNGTSGGSTNDNTYFGYSTPWGYFDFNRFHCHFSPRDWQRLINNNWGFRPKRLNFKLFNIQVKEVTQNEGTRTIANNLTSTIQVFTDSEYQLPYVLGSAHQGCLPPFPADVFMIPQYGYLTLNNGSQAVGRSSFYCLEYFPSQMLRTGNNFEFSYNFEDVPFHSSYAHSQSLDRLMNPLIDQYLYYLSRTQSTGGTAGTQQLLFSQAGPNNMSAQAKNWLPGPCYRQQRVSTTLSQNNNSNFAWTGATKYHLNGRDSLVNPGVAMATHRDDEERFFPSSGVLMFGRQGAGRDNVDYSSVMLTSEEEIRTTNPVATEQYGVVADNLQQQNAAPIVGAVNSQGALPGMVWQNRDVYLQGPIWAKIPHTDGNFHPSPLMGGFGLKHPPPQILIKNTPVPADPPTTFNQAKLASFITQYSTGQVSVEIEWELQKENSKRWNPEIQYTSNYYKSTNVDFAVNTEGTYSEPRPIGTRYLTRNL

SEQ ID NO: 1444 - protein, 738 aa, Artificial Sequence
  Description of Artificial Sequence: Synthetic polypeptide
MAADGYLPDWLEDNLSEGIREWWDLKPGAPKPKANQQRQDNGRGLVLPGYRYLGPFNGLDKGEPVNAADAAALEHDRAYDQQLQAGDNPYLRYNHADAEFQERLQEDTSFGGNLGRAVFQAKKRVLEPLGLVESPVRTAPGKKRPVEPSPQRSPDSSTGIGKRGQQPAKKRLNFGQTGDSESVPDPQPIGEPPAAPSGVGPNTMAAGGGAPMADNNEGADGVGSSSGNWHCDSTWLGDRVITTSTRTWALPTYNNHLYRQISNGTSGGSTNDNTYFGYSTPWGYFDFNRFHCHFSPRDWQRLINNNWGFRPKRLNFKLFNIQVKEVTQNEGTRTIANNLTSTIQVFTDSEYQLPYVLGSAHQGCLPPFPADVFMIPQYGYLTLNNGSQAVGRSSFYCLEYFPSQMLRTGNNFEFSYNFEDVPFHSSYAHSQSLDRLMNPLIDQYLYYLSRTQSTGGTAGTQQLLFSQAGPNNMSAQAKNWLPGPCYRQQRVSTTLSQNNNSNFAWTGATKYHLNGRDSLVNPGVAMATHRDDEERFFPSSGVLMFGKQGAGRDNVDYSSVMLTSEEEIRTTNPVATEQYGVVADNLQQQNAAPIVGAVNSQGALPGMVWQNRDVYLQGPIWAKIPHTDGNFHPSPLMGGFGLKHPPPQILIKNTPVPADPPTTFNQARLASFITQYSTGQVSVEIEWELQKENSKRWNPEIQYTSNYYKSTNVDFAVNTEGTYSEPRPIGTRYLTRNL

SEQ ID NO: 1445 - protein, 738 aa, Artificial Sequence
  Description of Artificial Sequence: Synthetic polypeptide
MAADGYLPDWLEDNLSEGIREWWDLKPGAPKPKANQQRQDNGRGLVLPGYRYLGPFNGLDKGEPVNAADAAALEHDRAYDQQLQAGDNPYLRYNHADAEFQERLQEDTSFGGNLGRAVFQAKKRVLEPLGLVESPVRTAPGKKRPVEPSPQRSPDSSTGIGKKGQQPAKKRLNFGQTGDSESVPDPQPIGEPPAAPSGVGPNTMAAGGGAPMADNNEGADGVGSSSGNWHCDSTWLGDRVITTSTRTWALPTYNNHLYRQISNGTSGGSTNDNTYFGYSTPWGYFDFNRFHCHFSPRDWQRLINNNWGFRPKRLNFKLFNIQVKEVTQNEGTRTIANNLTSTIQVFTDSEYQLPYVLGSAHQGCLPPFPADVFMIPQYGYLTLNNGSQAVGRSSFYCLEYFPSQMLRTGNNFEFSYNFEDVPFHSSYAHSQSLDRLMNPLIDQYLYYLSRTQSTGGTAGTQQLLFSQAGPNNMSAQAKNWLPGPCYRQQRVSTTLSQNNNSNFAWTGATKYHLNGRDSLVNPGVAMATHRDDEERFFPSSGVLMFGRQGAGRDNVDYSSVMLTSEEEIRTTNPVATEQYGVVADNLQQQNAAPIVGAVNSQGALPGMVWQNRDVYLQGPIWAKIPHTDGNFHPSPLMGGFGLKHPPPQILIKNTPVPADPPTTFNQARLASFITQYSTGQVSVEIEWELQKENSKRWNPEIQYTSNYYKSTNVDFAVNTEGTYSEPRPIGTRYLTRNL

SEQ ID NO: 1446 - DNA, 2214 bp, Artificial Sequence
  Description of Artificial Sequence: Synthetic polynucleotide
atggctgccgatggttatcttccagattggctcgaggacaacctctctgagggcattcgcgagtggtgggacctgaaacctggagccccgaaacccaaagccaaccagcaaaagcaggacaacggccggggtctggtgcttcctggctacaagtacctcggacccttcaacggactcgacaagggggagcccgtcaacgcggcggacgcagcggccctcgagcacgacaaggcctacgaccagcagctccaagcgggtgacaatccgtacctgcggtataatcacgccgacgccgagtttcaggagcgtctgcaagaagatacgtcttttgggggcaacctcgggcgcgcagtcttccaggccaaaaagcgggttctcgaacctctgggcctggttgaatcgccggttaagacggctcctggaaagaagagaccggtagagccatcaccccagcgctctccagactcctctacgggcatcggcaagaaaggccagcagcccgcaaaaaagagactcaattttgggcagactggcgactcagagtcagtccccgaccctcaaccaatcggagaaccaccagcagccccctctggtgtgggacctaatacaatggctgcaggcggtggcgctccaatggcagacaataacgaaggcgccgacggagtgggtagttcctcaggaaattggcattgcgattccacatggctgggcgacagagtcatcaccaccagcacccgcacctgggccctgcccacctacaacaaccacctctacaagcaaatctccaacgggacctcgggaggaagcaccaacgacaacacctacttcggctacagcaccccctgggggtattttgacttcaacagattccactgccacttttcaccacgtgactggcagcgactcatcaacaacaactggggattccggcccaagaggctcaacttcaagctcttcaacatccaagtcaaggaggtcacgcagaatgaaggcaccaagaccatcgccaataaccttaccagcacgattcaggtctttacggactcggaataccagctcccgtacgtgctcggctcggcgcaccagggctgcctgcctccgttcccggcggacgtcttcatgattcctcagtacgggtacctgactctgaacaatggcagtcaggctgtgggccggtcgtccttctactgcctggagtactttccttctcaaatgctgagaacgggcaacaactttgaattcagctacaacttcgaggacgtgcccttccacagcagctacgcgcacagccagagcctggaccggctgatgaaccctctcatcgaccagtacttgtactacctgtcccggactcaaagcacgggcggtactgcaggaactcagcagttgctattttctcaggccgggcctaacaacatgtcggctcaggccaagaactggctacccggtccctgctaccggcagcaacgcgtctccacgacactgtcgcagaacaacaacagcaactttgcctggacgggtgccaccaagtatcatctgaatggcagagactctctggtgaatcctggcgttgccatggctacccacaaggacgacgaagagcgattttttccatccagcggagtcttaatgtttgggaaacagggagctggaaaagacaacgtggactatagcagcgtgatgctaaccagcgaggaagaaataaagaccaccaacccagtggccacagaacagtacggcgtggtggccgataacctgcaacagcaaaacgccgctcctattgtaggggccgtcaatagtcaaggagccttacctggcatggtgtggcagaaccgggacgtgtacctgcagggtcccatctgggccaagattcctcatacggacggcaactttcatccctcgccgctgatgggaggctttggactgaagcatccgcctcctcagatcctgattaaaaacacacctgttcccgcggatcctccgaccaccttcaatcaggccaagctggcttctttcatcacgcagtacagtaccggccaggtcagcgtggagatcgagtgggagctgcagaaggagaacagcaaacgctggaacccagagattcagtacacttccaactactacaaatctacaaatgtggactttgctgtcaatactgagggtacttattccgagcctcgccccattggcacccgttacctcacccgtaatctg

SEQ ID NO: 1447 - DNA, 2217 bp, Artificial Sequence
  Description of Artificial Sequence: Synthetic polynucleotide
atggctgccgatggttatcttccagattggctcgaggacaacctctctgagggcattcgcgagtggtgggacctgaaacctggagccccgaaacccaaagccaaccagcaaaggcaggacaacggccggggtctggtgcttcctggctacaggtacctcggacccttcaacggactcgacaagggggagcccgtcaacgcggcggacgcagcggccctcgagcacgacagggcctacgaccagcagctccaagcgggtgacaatccgtacctgcggtataatcacgccgacgccgagtttcaggagcgtctgcaagaagatacgtcttttgggggcaacctcgggcgcgcagtcttccaggccaaaaagcgggttctcgaacctctgggcctggttgaatcgccggttaggacggctcctggaaagaagagaccggtagagccatcaccccagcgctctccagactcctctacgggcatcggcaagaaaggccagcagcccgcaagaaagagactcaattttgggcagactggcgactcagagtcagtccccgaccctcaaccaatcggagaaccaccagcagccccctctggtgtgggacctaatacaatggctgcaggcggtggcgctccaatggcagacaataacgaaggcgccgacggagtgggtagttcctcaggaaattggcattgcgattccacatggctgggcgacagagtcatcaccaccagcacccgcacctgggccctgcccacctacaacaaccacctctacaggcaaatctccaacgggacctcgggaggaagcaccaacgacaacacctacttcggctacagcaccccctgggggtattttgacttcaacagattccactgccacttttcaccacgtgactggcagcgactcatcaacaacaactggggattccggcccaagaggctcaacttcaagctcttcaacatccaagtcaaggaggtcacgcagaatgaaggcaccaggaccatcgccaataaccttaccagcacgattcaggtctttacggactcggaataccagctcccgtacgtgctcggctcggcgcaccagggctgcctgcctccgttcccggcggacgtcttcatgattcctcagtacgggtacctgactctgaacaatggcagtcaggctgtgggccggtcgtccttctactgcctggagtactttccttctcaaatgctgagaacgggcaacaactttgaattcagctacaacttcgaggacgtgcccttccacagcagctacgcgcacagccagagcctggaccggctgatgaaccctctcatcgaccagtacttgtactacctgtcccggactcaaagcacgggcggtactgcaggaactcagcagttgctattttctcaggccgggcctaacaacatgtcggctcaggccaagaactggctacccggtccctgctaccggcagcaacgcgtctccacgacactgtcgcagaacaacaacagcaactttgcctggacgggtgccaccaagtatcatctgaatggcagagactctctggtgaatcctggcgttgccatggctacccacagggacgacgaagagcgattttttccatccagcggagtcttaatgtttgggagacagggagctggaagagacaacgtggactatagcagcgtgatgctaaccagcgaggaagaaataaggaccaccaacccagtggccacagaacagtacggcgtggtggccgataacctgcaacagcaaaacgccgctcctattgtaggggccgtcaatagtcaaggagccttacctggcatggtgtggcagaaccgggacgtgtacctgcagggtcccatctgggccaagattcctcatacggacggcaactttcatccctcgccgctgatgggaggctttggactgaagcatccgcctcctcagatcctgattaaaaacacacctgttcccgcggatcctccgaccaccttcaatcaggccaagctggcttctttcatcacgcagtacagtaccggccaggtcagcgtggagatcgagtgggagctgcagaaggagaacagcaaacgctggaacccagagattcagtacacttccaactactacaaatctacaaatgtggactttgctgtcaatactgagggtacttattccgagcctcgccccattggcacccgttacctcacccgtaatctgtaa

SEQ ID NO: 1448 - DNA, 2217 bp, Artificial Sequence
  Description of Artificial Sequence: Synthetic polynucleotide
atggctgccgatggttatcttccagattggctcgaggacaacctctctgagggcattcgcgagtggtgggacctgaaacctggagccccgaaacccaaagccaaccagcaaaggcaggacaacggccggggtctggtgcttcctggctacaggtacctcggacccttcaacggactcgacaagggggagcccgtcaacgcggcggacgcagcggccctcgagcacgacagggcctacgaccagcagctccaagcgggtgacaatccgtacctgcggtataatcacgccgacgccgagtttcaggagcgtctgcaagaagatacgtcttttgggggcaacctcgggcgcgcagtcttccaggccaaaaagcgggttctcgaacctctgggcctggttgaatcgccggttaggacggctcctggaaagaagagaccggtagagccatcaccccagcgctctccagactcctctacgggcatcggcaagagaggccagcagcccgcaagaaagagactcaattttgggcagactggcgactcagagtcagtccccgaccctcaaccaatcggagaaccaccagcagccccctctggtgtgggacctaatacaatggctgcaggcggtggcgctccaatggcagacaataacgaaggcgccgacggagtgggtagttcctcaggaaattggcattgcgattccacatggctgggcgacagagtcatcaccaccagcacccgcacctgggccctgcccacctacaacaaccacctctacaggcaaatctccaacgggacctcgggaggaagcaccaacgacaacacctacttcggctacagcaccccctgggggtattttgacttcaacagattccactgccacttttcaccacgtgactggcagcgactcatcaacaacaactggggattccggcccaagaggctcaacttcaagctcttcaacatccaagtcaaggaggtcacgcagaatgaaggcaccaggaccatcgccaataaccttaccagcacgattcaggtctttacggactcggaataccagctcccgtacgtgctcggctcggcgcaccagggctgcctgcctccgttcccggcggacgtcttcatgattcctcagtacgggtacctgactctgaacaatggcagtcaggctgtgggccggtcgtccttctactgcctggagtactttccttctcaaatgctgagaacgggcaacaactttgaattcagctacaacttcgaggacgtgcccttccacagcagctacgcgcacagccagagcctggaccggctgatgaaccctctcatcgaccagtacttgtactacctgtcccggactcaaagcacgggcggtactgcaggaactcagcagttgctattttctcaggccgggcctaacaacatgtcggctcaggccaagaactggctacccggtccctgctaccggcagcaacgcgtctccacgacactgtcgcagaacaacaacagcaactttgcctggacgggtgccaccaagtatcatctgaatggcagagactctctggtgaatcctggcgttgccatggctacccacagggacgacgaagagcgattttttccatccagcggagtcttaatgtttgggaaacagggagctggaagagacaacgtggactatagcagcgtgatgctaaccagcgaggaagaaataaggaccaccaacccagtggccacagaacagtacggcgtggtggccgataacctgcaacagcaaaacgccgctcctattgtaggggccgtcaatagtcaaggagccttacctggcatggtgtggcagaaccgggacgtgtacctgcagggtcccatctgggccaagattcctcatacggacggcaactttcatccctcgccgctgatgggaggctttggactgaagcatccgcctcctcagatcctgattaaaaacacacctgttcccgcggatcctccgaccaccttcaatcaggccaagctggcttctttcatcacgcagtacagtaccggccaggtcagcgtggagatcgagtgggagctgcagaaggagaacagcaaacgctggaacccagagattcagtacacttccaactactacaaatctacaaatgtggactttgctgtcaatactgagggtacttattccgagcctcgccccattggcacccgttacctcacccgtaatctgtaa

SEQ ID NO: 1449 - DNA, 2217 bp, Artificial Sequence
  Description of Artificial Sequence: Synthetic polynucleotide
atggctgccgatggttatcttccagattggctcgaggacaacctctctgagggcattcgcgagtggtgggacctgaaacctggagccccgaaacccaaagccaaccagcaaaggcaggacaacggccggggtctggtgcttcctggctacaggtacctcggacccttcaacggactcgacaagggggagcccgtcaacgcggcggacgcagcggccctcgagcacgacagggcctacgaccagcagctccaagcgggtgacaatccgtacctgcggtataatcacgccgacgccgagtttcaggagcgtctgcaagaagatacgtcttttgggggcaacctcgggcgcgcagtcttccaggccaaaaagcgggttctcgaacctctgggcctggttgaatcgccggttaggacggctcctggaaagaagagaccggtagagccatcaccccagcgctctccagactcctctacgggcatcggcaagagaggccagcagcccgcaaaaaagagactcaattttgggcagactggcgactcagagtcagtccccgaccctcaaccaatcggagaaccaccagcagccccctctggtgtgggacctaatacaatggctgcaggcggtggcgctccaatggcagacaataacgaaggcgccgacggagtgggtagttcctcaggaaattggcattgcgattccacatggctgggcgacagagtcatcaccaccagcacccgcacctgggccctgcccacctacaacaaccacctctacaggcaaatctccaacgggacctcgggaggaagcaccaacgacaacacctacttcggctacagcaccccctgggggtattttgacttcaacagattccactgccacttttcaccacgtgactggcagcgactcatcaacaacaactggggattccggcccaagaggctcaacttcaagctcttcaacatccaagtcaaggaggtcacgcagaatgaaggcaccaggaccatcgccaataaccttaccagcacgattcaggtctttacggactcggaataccagctcccgtacgtgctcggctcggcgcaccagggctgcctgcctccgttcccggcggacgtcttcatgattcctcagtacgggtacctgactctgaacaatggcagtcaggctgtgggccggtcgtccttctactgcctggagtactttccttctcaaatgctgagaacgggcaacaactttgaattcagctacaacttcgaggacgtgcccttccacagcagctacgcgcacagccagagcctggaccggctgatgaaccctctcatcgaccagtacttgtactacctgtcccggactcaaagcacgggcggtactgcaggaactcagcagttgctattttctcaggccgggcctaacaacatgtcggctcaggccaagaactggctacccggtccctgctaccggcagcaacgcgtctccacgacactgtcgcagaacaacaacagcaactttgcctggacgggtgccaccaagtatcatctgaatggcagagactctctggtgaatcctggcgttgccatggctacccacagggacgacgaagagcgattttttccatccagcggagtcttaatgtttgggagacagggagctggaagagacaacgtggactatagcagcgtgatgctaaccagcgaggaagaaataaggaccaccaacccagtggccacagaacagtacggcgtggtggccgataacctgcaacagcaaaacgccgctcctattgtaggggccgtcaatagtcaaggagccttacctggcatggtgtggcagaaccgggacgtgtacctgcagggtcccatctgggccaagattcctcatacggacggcaactttcatccctcgccgctgatgggaggctttggactgaagcatccgcctcctcagatcctgattaaaaacacacctgttcccgcggatcctccgaccaccttcaatcaggccaagctggcttctttcatcacgcagtacagtaccggccaggtcagcgtggagatcgagtgggagctgcagaaggagaacagcaaacgctggaacccagagattcagtacacttccaactactacaaatctacaaatgtggactttgctgtcaatactgagggtacttattccgagcctcgccccattggcacccgttacctcacccgtaatctgtaa

SEQ ID NO: 1450 - DNA, 2217 bp, Artificial Sequence
  Description of Artificial Sequence: Synthetic polynucleotide
atggctgccgatggttatcttccagattggctcgaggacaacctctctgagggcattcgcgagtggtgggacctgaaacctggagccccgaaacccaaagccaaccagcaaaggcaggacaacggccggggtctggtgcttcctggctacaggtacctcggacccttcaacggactcgacaagggggagcccgtcaacgcggcggacgcagcggccctcgagcacgacagggcctacgaccagcagctccaagcgggtgacaatccgtacctgcggtataatcacgccgacgccgagtttcaggagcgtctgcaagaagatacgtcttttgggggcaacctcgggcgcgcagtcttccaggccaaaaagcgggttctcgaacctctgggcctggttgaatcgccggttaggacggctcctggaaagaagagaccggtagagccatcaccccagcgctctccagactcctctacgggcatcggcaagagaggccagcagcccgcaaaaaagagactcaattttgggcagactggcgactcagagtcagtccccgaccctcaaccaatcggagaaccaccagcagccccctctggtgtgggacctaatacaatggctgcaggcggtggcgctccaatggcagacaataacgaaggcgccgacggagtgggtagttcctcaggaaattggcattgcgattccacatggctgggcgacagagtcatcaccaccagcacccgcacctgggccctgcccacctacaacaaccacctctacaggcaaatctccaacgggacctcgggaggaagcaccaacgacaacacctacttcggctacagcaccccctgggggtattttgacttcaacagattccactgccacttttcaccacgtgactggcagcgactcatcaacaacaactggggattccggcccaagaggctcaacttcaagctcttcaacatccaagtcaaggaggtcacgcagaatgaaggcaccaggaccatcgccaataaccttaccagcacgattcaggtctttacggactcggaataccagctcccgtacgtgctcggctcggcgcaccagggctgcctgcctccgttcccggcggacgtcttcatgattcctcagtacgggtacctgactctgaacaatggcagtcaggctgtgggccggtcgtccttctactgcctggagtactttccttctcaaatgctgagaacgggcaacaactttgaattcagctacaacttcgaggacgtgcccttccacagcagctacgcgcacagccagagcctggaccggctgatgaaccctctcatcgaccagtacttgtactacctgtcccggactcaaagcacgggcggtactgcaggaactcagcagttgctattttctcaggccgggcctaacaacatgtcggctcaggccaagaactggctacccggtccctgctaccggcagcaacgcgtctccacgacactgtcgcagaacaacaacagcaactttgcctggacgggtgccaccaagtatcatctgaatggcagagactctctggtgaatcctggcgttgccatggctacccacagggacgacgaagagcgattttttccatccagcggagtcttaatgtttgggaaacagggagctggaagagacaacgtggactatagcagcgtgatgctaaccagcgaggaagaaataaggaccaccaacccagtggccacagaacagtacggcgtggtggccgataacctgcaacagcaaaacgccgctcctattgtaggggccgtcaatagtcaaggagccttacctggcatggtgtggcagaaccgggacgtgtacctgcagggtcccatctgggccaagattcctcatacggacggcaactttcatccctcgccgctgatgggaggctttggactgaagcatccgcctcctcagatcctgattaaaaacacacctgttcccgcggatcctccgaccaccttcaatcaggccaggctggcttctttcatcacgcagtacagtaccggccaggtcagcgtggagatcgagtgggagctgcagaaggagaacagcaaacgctggaacccagagattcagtacacttccaactactacaaatctacaaatgtggactttgctgtcaatactgagggtacttattccgagcctcgccccattggcacccgttacctcacccgtaatctgtaa

SEQ ID NO: 1451 - DNA, 2217 bp, Artificial Sequence
  Description of Artificial Sequence: Synthetic polynucleotide
atggctgccgatggttatcttccagattggctcgaggacaacctctctgagggcattcgcgagtggtgggacctgaaacctggagccccgaaacccaaagccaaccagcaaaggcaggacaacggccggggtctggtgcttcctggctacaggtacctcggacccttcaacggactcgacaagggggagcccgtcaacgcggcggacgcagcggccctcgagcacgacagggcctacgaccagcagctccaagcgggtgacaatccgtacctgcggtataatcacgccgacgccgagtttcaggagcgtctgcaagaagatacgtcttttgggggcaacctcgggcgcgcagtcttccaggccaaaaagcgggttctcgaacctctgggcctggttgaatcgccggttaggacggctcctggaaagaagagaccggtagagccatcaccccagcgctctccagactcctctacgggcatcggcaagaaaggccagcagcccgcaaaaaagagactcaattttgggcagactggcgactcagagtcagtccccgaccctcaaccaatcggagaaccaccagcagccccctctggtgtgggacctaatacaatggctgcaggcggtggcgctccaatggcagacaataacgaaggcgccgacggagtgggtagttcctcaggaaattggcattgcgattccacatggctgggcgacagagtcatcaccaccagcacccgcacctgggccctgcccacctacaacaaccacctctacaggcaaatctccaacgggacctcgggaggaagcaccaacgacaacacctacttcggctacagcaccccctgggggtattttgacttcaacagattccactgccacttttcaccacgtgactggcagcgactcatcaacaacaactggggattccggcccaagaggctcaacttcaagctcttcaacatccaagtcaaggaggtcacgcagaatgaaggcaccaggaccatcgccaataaccttaccagcacgattcaggtctttacggactcggaataccagctcccgtacgtgctcggctcggcgcaccagggctgcctgcctccgttcccggcggacgtcttcatgattcctcagtacgggtacctgactctgaacaatggcagtcaggctgtgggccggtcgtccttctactgcctggagtactttccttctcaaatgctgagaacgggcaacaactttgaattcagctacaacttcgaggacgtgcccttccacagcagctacgcgcacagccagagcctggaccggctgatgaaccctctcatcgaccagtacttgtactacctgtcccggactcaaagcacgggcggtactgcaggaactcagcagttgctattttctcaggccgggcctaacaacatgtcggctcaggccaagaactggctacccggtccctgctaccggcagcaacgcgtctccacgacactgtcgcagaacaacaacagcaactttgcctggacgggtgccaccaagtatcatctgaatggcagagactctctggtgaatcctggcgttgccatggctacccacagggacgacgaagagcgattttttccatccagcggagtcttaatgtttgggagacagggagctggaagagacaacgtggactatagcagcgtgatgctaaccagcgaggaagaaataaggaccaccaacccagtggccacagaacagtacggcgtggtggccgataacctgcaacagcaaaacgccgctcctattgtaggggccgtcaatagtcaaggagccttacctggcatggtgtggcagaaccgggacgtgtacctgcagggtcccatctgggccaagattcctcatacggacggcaactttcatccctcgccgctgatgggaggctttggactgaagcatccgcctcctcagatcctgattaaaaacacacctgttcccgcggatcctccgaccaccttcaatcaggccaggctggcttctttcatcacgcagtacagtaccggccaggtcagcgtggagatcgagtgggagctgcagaaggagaacagcaaacgctggaacccagagattcagtacacttccaactactacaaatctacaaatgtggactttgctgtcaatactgagggtacttattccgagcctcgccccattggcacccgttacctcacccgtaatctgtaa

SEQ ID NO: 1452 - protein, 744 aa, Artificial Sequence
  Description of Artificial Sequence: Synthetic polypeptide
MAADGYLPDWLEDTLSEGIRQWWKLKPGPPPPKPAERHKDDSRGLVLPGYKYLGPFNGLDKGEPVNEADAAALEHDKAYDRQLDSGDNPYLKYNHADAEFQERLKEDTSFGGNLGRAVFQAKKRVLEPLGLVEEPVKTAPGKKRPVEHSPVEPDSSSGTGKAGQQPARKRLNFGQTGDADSVPDPQPLGQPPAAPSGLGTNTMATGSGAPMADNNEGADGVGNSSGNWHCDSTWMGDRVITTSTRTWALPTYNNHLYKQISSQSGASNDNHYFGYSTPWGYFDFNRFHCHFSPRDWQRLINNNWGFRPKRLNFKLFNIQVKEVTQNDGTTTIANNLTSTVQVFTDSEYQLPYVLGSAHQGCLPPFPADVFMVPQYGYLTLNNGSQAVGRSSFYCLEYFPSQMLRTGNNFTFSYTFEDVPFHSSYAHSQSLDRLMNPLIDQYLYYLSRTNTPSGTTTQSRLQFSQAGASDIRDQSRNWLPGPCYRQQRVSKTSADNNNSEYSWTGATKYHLNGRDSLVNPGPAMASHKDDEEKFFPQSGVLIFGKQGSEKTNVDIEKVMITDEEEIRTTNPVATEQYGSVSTNLQRGQRGESGHGYFAQAATADVNTQGVLPGMVWQDRDVYLQGPIWAKIPHTDGHFHPSPLMGGFGLKHPPPQILIKNTPVPANPSTTFSAAKFASFITQYSTGQVSVEIEWELQKENSKRWNPEIQYTSNYNKSVNVDFTVDTNGVYSEPRPIGTRYLTRNL

SEQ ID NO: 1453 - DNA, 8359 bp, Artificial Sequence
  Description of Artificial Sequence: Synthetic polynucleotide
catcatcaataatataccttattttggattgaagccaatatgataatgagggggtggagtttgtgacgtggcgcggggcgtgggaacggggcgggtgacgtagtagctctagaggtcctgtattagaggtcacgtgagtgttttgcgacattttgcgacaccatgtggtcacgctgggtatttaagcccgagtgagcacgcagggtctccattttgaagcgggaggtttgaacgcgcagccgccatgccggggttttacgagattgtgattaaggtccccagcgaccttgacgagcatctgcccggcatttctgacagctttgtgaactgggtggccgagaaggaatgggagttgccgccagattctgacatggatctgaatctgattgagcaggcacccctgaccgtggccgagaagctgcagcgcgactttctgacggaatggcgccgtgtgagtaaggcaccggaggcccttttctttgtgcaatttgagaagggagagagctacttccacatgcacgtgctcgtggaaaccaccggggtgaaatccatggttttgggacgtttcctgagtcagattcgcgaaaaactgattcagagaatttaccgcgggatcgagccgactttgccaaactggttcgcggtcacaaagaccagaaatggcgccggaggcgggaacaaggtggtggatgagtgctacatccccaattacttgctccccaaaacccagcctgagctccagtgggcgtggactaatatggaacagtatttaagcgcctgtttgaatctcacggagcgtaaacggttggtggcgcagcatctgacgcacgtgtcgcagacgcaggagcagaacaaagagaatcagaatcccaattctgatgcgccggtgatcagatcaaaaacttcagccaggtacatggagctggtcgggtggctcgtggacaaggggattacctcggagaagcagtggatccaggaggaccaggcctcatacatctccttcaatgcggcctccaactcgcggtcccaaatcaaggctgccttggacaatgcgggaaagattatgagcctgactaaaaccgcccccgactacctggtgggccagcagcccgtggaggacatttccagcaatcggatttataaaattttggaactaaacgggtacgatccccaatatgcggcttccgtctttctgggatgggccacgaaaaagttcggcaagaggaacaccatctggctgtttgggcctgcaactaccgggaagaccaacatcgcggaggccatagcccacactgtgcccttctacgggtgcgtaaactggaccaatgagaactttcccttcaacgactgtgtcgacaagatggtgatctggtgggaggaggggaagatgaccgccaaggtcgtggagtcggccaaagccattctcggaggaagcaaggtgcgcgtggaccagaaatgcaagtcctcggcccagatagacccgactcccgtgatcgtcacctccaacaccaacatgtgcgccgtgattgacgggaactcaacgaccttcgaacaccagcagccgttgcaagaccggatgttcaaatttgaactcacccgccgtctggatcatgactttgggaaggtcaccaagcaggaagtcaaagactttttccggtgggcaaaggatcacgtggttgaggtggagcatgaattctacgtcaaaaagggtggagccaagaaaagacccgcccccagtgacgcagatataagtgagcccaaacgggtgcgcgagtcagttgcgcagccatcgacgtcagacgcggaagcttcgatcaactacgcagacaggtaccaaaacaaatgttctcgtcacgtgggcatgaatctgatgctgtttccctgcagacaatgcgagagaatgaatcagaattcaaatatctgcttcactcacggacagaaagactgtttagagtgctttcccgtgtcagaatctcaacccgtttctgtcgtcaaaaaggcgtatcagaaactgtgctacattcatcatatcatgggaaaggtgccagacgcttgcactgcctgcgatctggtcaatgtggatttggatgactgcatctttgaacaataaatgatttaaatcaggtatggctgccgatggttatcttccagattggctcgaggacactctctctgaaggaataagacagtggtggaagctcaaacctggcccaccaccaccaaagcccgcagagcggcataaggacgacagcaggggtcttgtgcttcctgggtacaagtacctcggacccttcaacggactcgacaagggagagccggtcaacgaggcagacgccgcggccctcgagcacgacaaagcctacgaccggcagctcgacagcggagacaacccgtacctcaagtacaaccacgccgacgcggagtttcaggagcgccttaaagaagatacgtcttttgggggcaacctcggacgagcagtcttccaggcgaaaaagagggttcttgaacctctgggcctggttgaggaacctgttaagacggctccgggaaaaaagaggccggtagagcactctcctgtggagccagactcctcctcgggaaccggaaaggcgggccagcagcctgcaagaaaaagattgaattttggtcagactggagacgcagactcagtacctgacccccagcctctcggacagccaccagcagccccctctggtctgggaactaatacgatggctacaggcagtggcgcaccaatggcagacaataacgagggcgccgacggagtgggtaattcctcgggaaattggcattgcgattccacatggatgggcgacagagtcatcaccaccagcacccgaacctgggccctgcccacctacaacaaccacctctacaaacaaatttccagccaatcaggagcctcgaacgacaatcactactttggctacagcaccccttgggggtattttgacttcaacagattccactgccacttttcaccacgtgactggcaaagactcatcaacaacaactggggattccgacccaagagactcaacttcaagctctttaacattcaagtcaaagaggtcacgcagaatgacggtacgacgacgattgccaataaccttaccagcacggttcaggtgtttactgactcggagtaccagctcccgtacgtcctcggctcggcgcatcaaggatgcctcccgccgttcccagcagacgtcttcatggtgccacagtatggatacctcaccctgaacaacgggagtcaggcagtaggacgctcttcattttactgcctggagtactttccttctcagatgctgcgtaccggaaacaactttaccttcagctacacttttgaggacgttcctttccacagcagctacgctcacagccagagtctggaccgtctcatgaatcctctcatcgaccagtacctgtattacttgagcagaacaaacactccaagtggaaccaccacgcagtcaaggcttcagttttctcaggccggagcgagtgacattcgggaccagtctaggaactggcttcctggaccctgttaccgccagcagcgagtatcaaagacatctgcggataacaacaacagtgaatactcgtggactggagctaccaagtaccacctcaatggcagagactctctggtgaatccgggcccggccatggcaagccacaaggacgatgaagaaaagttttttcctcagagcggggttctcatctttgggaagcaaggctcagagaaaacaaatgtggacattgaaaaggtcatgattacagacgaagaggaaatcaggacaaccaatcccgtggctacggagcagtatggttctgtatctaccaacctccagagaggccagagaggcgagtctggtcatggttattttgcccaggcggccaccgcagatgtcaacacacaaggcgttcttccaggcatggtctggcaggacagagatgtgtaccttcaggggcccatctgggcaaagattccacacacggacggacattttcacccctctcccctcatgggtggattcggacttaaacaccctcctccacagattctcatcaagaacaccccggtacctgcgaatccttcgaccaccttcagtgcggcaaagtttgcttccttcatcacacagtactccacgggacaggtcagcgtggagatcgagtgggagctgcagaaggaaaacagcaaacgctggaatcccgaaattcagtacacttccaactacaacaagtctgttaatgtggactttactgtggacactaatggcgtgtattcagagcctcgccccattggcaccagatacctgactcgtaatctgtaattgcttgttaatcaataaaccgtttaattcgtttcagttgaactttggtctctgcgtatttctttcttatctagtttccatgctctagaggtcctgtattagaggtcacgtgagtgttttgcgacattttgcgacaccatgtggtcacgctgggtatttaagcccgagtgagcacgcagggtctccattttgaagcgggaggtttgaacgcgcagccaccacggcggggttttacgagattgtgattaaggtccccagcgaccttgacgagcatctgcccggcatttctgacagctttgtgaactgggtggccgagaaggaatgggagttgccgccagattctgacatggatctgaatctgattgagcaggcacccctgaccgtggccgagaagctgcatcgctggcgtaatagcgaagaggcccgcaccgatcgcccttcccaacagttgcgcagcctgaatggcgaatggcgattccgttgcaatggctggcggtaatattgttctggatattaccagcaaggccgatagtttgagttcttctactcaggcaagtgatgttattactaatcaaagaagtattgcgacaacggttaatttgcgtgatggacagactcttttactcggtggcctcactgattataaaaacacttctcaggattctggcgtaccgttcctgtctaaaatccctttaatcggcctcctgtttagctcccgctctgattctaacgaggaaagcacgttatacgtgctcgtcaaagcaaccatagtacgcgccctgtagcggcgcattaagcgcggcgggtgtggtggttacgcgcagcgtgaccgctacacttgccagcgccctagcgcccgctcctttcgctttcttcccttcctttctcgccacgttcgccggctttccccgtcaagctctaaatcgggggctccctttagggttccgatttagtgctttacggcacctcgaccccaaaaaacttgattagggtgatggttcacgtagtgggccatcgccctgatagacggtttttcgccctttgacgttggagtccacgttctttaatagtggactcttgttccaaactggaacaacactcaaccctatctcggtctattcttttgatttataagggattttgccgatttcggcctattggttaaaaaatgagctgatttaacaaaaatttaacgcgaattttaacaaaatattaacgtttacaatttaaatatttgcttatacaatcttcctgtttttggggcttttctgattatcaaccggggtacatatgattgacatgctagttttacgattaccgttcatcgattctcttgtttgctccagactctcaggcaatgacctgatagcctttgtagagacctctcaaaaatagctaccctctccggcatgaatttatcagctagaacggttgaatatcatattgatggtgatttgactgtctccggcctttctcacccgtttgaatctttacctacacattactcaggcattgcatttaaaatatatgagggttctaaaaatttttatccttgcgttgaaataaaggcttctcccgcaaaagtattacagggtcataatgtttttggtacaaccgatttagctttatgctctgaggctttattgcttaattttgctaattctttgccttgcctgtatgatttattggatgttggaattcctgatgcggtattttctccttacgcatctgtgcggtatttcacaccgcatatggtgcactctcagtacaatctgctctgatgccgcatagttaagccagccccgacacccgccaacacccgctgacgcgccctgacgggcttgtctgctcccggcatccgcttacagacaagctgtgaccgtctccgggagctgcatgtgtcagaggttttcaccgtcatcaccgaaacgcgcgagacgaaagggcctcgtgatacgcctatttttataggttaatgtcatgataataatggtttcttagacgtcaggtggcacttttcggggaaatgtgcgcggaacccctatttgtttatttttctaaatacattcaaatatgtatccgctcatgagacaataaccctgataaatgcttcaataatattgaaaaaggaagagtatgagtattcaacatttccgtgtcgcccttattcccttttttgcggcattttgccttcctgtttttgctcacccagaaacgctggtgaaagtaaaagatgctgaagatcagttgggtgcacgagtgggttacatcgaactggatctcaacagcggtaagatccttgagagttttcgccccgaagaacgttttccaatgatgagcacttttaaagttctgctatgtggcgcggtattatcccgtattgacgccgggcaagagcaactcggtcgccgcatacactattctcagaatgacttggttgagtactcaccagtcacagaaaagcatcttacggatggcatgacagtaagagaattatgcagtgctgccataaccatgagtgataacactgcggccaacttacttctgacaacgatcggaggaccgaaggagctaaccgcttttttgcacaacatgggggatcatgtaactcgccttgatcgttgggaaccggagctgaatgaagccataccaaacgacgagcgtgacaccacgatgcctgtagcaatggcaacaacgttgcgcaaactattaactggcgaactacttactctagcttcccggcaacaattaatagactggatggaggcggataaagttgcaggaccacttctgcgctcggcccttccggctggctggtttattgctgataaatctggagccggtgagcgtgggtctcgcggtatcattgcagcactggggccagatggtaagccctcccgtatcgtagttatctacacgacggggagtcaggcaactatggatgaacgaaatagacagatcgctgagataggtgcctcactgattaagcattggtaactgtcagaccaagtttactcatatatactttagattgatttaaaacttcatttttaatttaaaaggatctaggtgaagatcctttttgataatctcatgaccaaaatcccttaacgtgagttttcgttccactgagcgtcagaccccgtagaaaagatcaaaggatcttcttgagatcctttttttctgcgcgtaatctgctgcttgcaaacaaaaaaaccaccgctaccagcggtggtttgtttgccggatcaagagctaccaactctttttccgaaggtaactggcttcagcagagcgcagataccaaatactgtccttctagtgtagccgtagttaggccaccacttcaagaactctgtagcaccgcctacatacctcgctctgctaatcctgttaccagtggctgctgccagtggcgataagtcgtgtcttaccgggttggactcaagacgatagttaccggataaggcgcagcggtcgggctgaacggggggttcgtgcacacagcccagcttggagcgaacgacctacaccgaactgagatacctacagcgtgagctatgagaaagcgccacgcttcccgaagggagaaaggcggacaggtatccggtaagcggcagggtcggaacaggagagcgcacgagggagcttccagggggaaacgcctggtatctttatagtcctgtcgggtttcgccacctctgacttgagcgtcgatttttgtgatgctcgtcaggggggcggagcctatggaaaaacgccagcaacgcggcctttttacggttcctggccttttgctggccttttgctcacatgttctttcctgcgttatcccctgattctgtggataaccgtattaccgcctttgagtgagctgataccgctcgccgcagccgaacgaccgagcgcagcgagtcagtgagcgaggaagcggaagagcgcccaatacgcaaaccgcctctccccgcgcgttggccgattcattaatgcagaattcc

SEQ ID NO: 1454 - protein, 736 aa, Artificial Sequence
  Description of Artificial Sequence: Synthetic polypeptide
MAADGYLPDWLEDNLSEGIREWWDLKPGAPKPKANQQKQDDGRGLVLPGYKYLGPFNGLDKGEPVNAADAAALEHDKAYDQQLKAGDNPYLRYNHADAEFQERLQEDTSFGGNLGRAVFQAKKRVLEPLGLVEEGAKTAPGKKRPVEQSPQEPDSSSGIGKKGQQPAKKRLNFGQTGDSESVPDPQPLGEPPAAPSGVGSNTMAAGGGAPMADNNEGADGVGNASGNWHCDSTWLGDRVITTSTRTWALPTYNNHLYKQISSQSGASTNDNTYFGYSTPWGYFDFNRFHCHFSPRDWQRLINNNWGFRPKRLNFKLFNIQVKEVTTNDGTTTIANNLTSTVQVFTDSEYQLPYVLGSAHQGCLPPFPADVFMIPQYGYLTLNNGSQAVGRSSFYCLEYFPSQMLRTGNNFEFSYTFEDVPFHSSYAHSQSLDRLMNPLIDQYLYYLSRTQTTSGTAGNRTLQFSQAGPSSMANQAKNWLPGPCYRQQRVSKTANQNNNSNFAWTGATKYHLNGRDSLVNPGPAMATHKDDEDKFFPMSGVLIFGKQGAGNSNVDLDNVMITSEEEIKTTNPVATEQYGTVATNLQSSNTAPATGTVNSQGALPGMVWQNRDVYLQGPIWAKIPHTDGHFHPSPLMGGFGLKHPPPQILIKNTPVPANPPTTFSPAKFASFITQYSTGQVSVEIEWELQKENSKRWNPEIQYTSNYNKSTNVDFAVDTNGVYSEPRPIGTRYLTRNL

SEQ ID NO: 1455 - DNA, 2208 bp, Artificial Sequence
  Description of Artificial Sequence: Synthetic polynucleotide
atggctgccgatggttatcttccagattggctcgaggacaacctctctgagggcattcgcgagtggtgggacttgaaacctggagccccgaaacccaaagccaaccagcaaaagcaggacgacggccggggtctggtgcttcctggctacaagtacctcggacccttcaacggactcgacaagggggagcccgtcaacgcggcggacgcagcggccctcgagcacgacaaggcctacgaccagcagctcaaagcgggtgacaatccgtacctgcggtataaccacgccgacgccgagtttcaggagcgtctgcaagaagatacgtcttttgggggcaacctcgggcgagcagtcttccaggccaagaagcgggttctcgaacctctcggtctggttgaggaaggcgctaagacggctcctggaaagaagagaccggtagagcaatcaccccaggaaccagactcctcttcgggcatcggcaagaaaggccagcagcccgcgaagaagagactcaactttgggcagacaggcgactcagagtcagtgcccgaccctcaaccactcggagaaccccccgcagccccctctggtgtgggatctaatacaatggcagcaggcggtggcgctccaatggcagacaataacgaaggcgccgacggagtgggtaacgcctcaggaaattggcattgcgattccacatggctgggcgacagagtcatcaccaccagcacccgaacctgggccctccccacctacaacaaccacctctacaagcaaatctccagccaatcgggagcaagcaccaacgacaacacctacttcggctacagcaccccctgggggtattttgactttaacagattccactgccacttctcaccacgtgactggcagcgactcatcaacaacaactggggattccggcccaagagactcaacttcaagctcttcaacatccaggtcaaggaggtcacgacgaatgatggcaccacgaccatcgccaataaccttaccagcacggttcaggtctttacggactcggaataccagctcccgtacgtcctcggctctgcgcaccagggctgcctgcctccgttcccggcggacgtcttcatgattcctcagtacgggtacctgactctgaacaatggcagtcaggccgtgggccgttcctccttctactgcctggagtactttccttctcaaatgctgagaacgggcaacaactttgagttcagctacacgtttgaggacgtgccttttcacagcagctacgcgcacagccaaagcctggaccggctgatgaaccccctcatcgaccagtacctgtactacctgtctcggactcagaccacgagtggtaccgcaggaaatcggacgttgcaattttctcaggccgggcctagtagcatggcgaatcaggccaaaaactggctacccgggccctgctaccggcagcaacgcgtctccaagacagcgaatcaaaataacaacagcaactttgcctggaccggtgccaccaagtatcatctgaatggcagagactctctggtaaatcccggtcccgctatggcaacccacaaggacgacgaagacaaattttttccgatgagcggagtcttaatatttgggaaacagggagctggaaatagcaacgtggaccttgacaacgttatgataaccagtgaggaagaaattaaaaccaccaacccagtggccacagaacagtacggcacggtggccactaacctgcaatcgtcaaacaccgctcctgctacagggaccgtcaacagtcaaggagccttacctggcatggtctggcagaaccgggacgtgtacctgcagggtcctatctgggccaagattcctcacacggacggacactttcatccctcgccgctgatgggaggctttggactgaaacacccgcctcctcagatcctgattaagaatacacctgttcccgcgaatcctccaactaccttcagtccagctaagtttgcgtcgttcatcacgcagtacagcaccggacaggtcagcgtggaaattgaatgggagctgcagaaagaaaacagcaaacgctggaacccagagattcaatacacttccaactacaacaaatctacaaatgtggactttgctgttgacacaaatggcgtttattctgagcctcgccccatcggcacccgttacctcacccgtaatctg

SEQ ID NO: 1456 - protein, 737 aa, Artificial Sequence
  Description of Artificial Sequence: Synthetic polypeptide
MAADGYLPDWLEDNLSEGIREWWDLKPGAPKPKANQQKQDDGRGLVLPGYKYLGPFNGLDKGEPVNAADAAALEHDKAYDQQLKAGDNPYLRYNHADAEFQERLQEDTSFGGNLGRAVFQAKKRVLEPLGLVEEGAKTAPGKKRPVEQSPQEPDSSTGIGKKGQQPAKKRLNFGQTGDSESVPDPQPLGEPPAAPSGVGSNTMAAGGGAPMADNNEGADGVGNASGNWHCDSTWLGDRVITTSTRTWALPTYNNHLYKQISNSQSGGSTNDNTYFGYSTPWGYFDFNRFHCHFSPRDWQRLINNNWGFRPKRLNFKLFNIQVKEVTTNDGTTTIANNLTSTVQVFTDSEYQLPYVLGSAHQGCLPPFPADVFMIPQYGYLTLNNGSQAVGRSSFYCLEYFPSQMLRTGNNFEFSYTFEDVPFHSSYAHSQSLDRLMNPLIDQYLYYLSRTQTTGGTAGNRTLQFSQAGPSSMANQAKNWLPGPCYRQQRVSKTTNQNNNSNFAWTGATKYHLNGRDSLVNPGVAMATHKDDEDRFFPSSGVLIFGKQGAGNDNVDLDNVMITSEEEIKTTNPVATEEYGVVATNLQSANTAPQTGTVNSQGALPGMVWQNRDVYLQGPIWAKIPHTDGNFHPSPLMGGFGLKHPPPQILIKNTPVPANPPTTFSPAKFASFITQYSTGQVSVEIEWELQKENSKRWNPEIQYTSNYNKSTNVDFAVDTEGVYSEPRPIGTRYLTRNL

SEQ ID NO: 1457 - DNA, 2211 bp, Artificial Sequence
  Description of Artificial Sequence: Synthetic polynucleotide
atggctgccgatggttatcttccagattggctcgaggacaacctctctgagggcattcgcgagtggtgggacttgaaacctggagccccgaaacccaaagccaaccagcaaaagcaggacgacggccggggtctggtgcttcctggctacaagtacctcggacccttcaacggactcgacaagggggagcccgtcaacgcggcggacgcagcggccctcgagcacgacaaggcctacgaccagcagctcaaagcgggtgacaatccgtacctgcggtataaccacgccgacgccgagtttcaggagcgtctgcaagaagatacgtcttttgggggcaacctcgggcgagcagtcttccaggccaagaagcgggttctcgaacctctcggtctggttgaggaaggcgctaagacggctcctggaaagaagagaccggtagagcaatcaccccaggaaccagactcctctacgggcatcggcaagaaaggccagcagcccgcgaaaaagagactcaactttgggcagactggcgactcagagtcagtgcccgaccctcaaccactcggagaaccccccgcagccccctctggtgtgggatctaatacaatggctgcaggcggtggcgctccaatggcagacaataacgaaggcgccgacggagtgggtaatgcctcaggaaattggcattgcgattccacatggctgggcgacagagtcatcaccaccagcacccgaacctgggccctccccacctacaacaaccacctctacaagcaaatctccaacagccaatcgggaggaagcaccaacgacaacacctacttcggctacagcaccccctgggggtattttgactttaacagattccactgccacttctcaccacgtgactggcagcgactcatcaacaacaactggggattccggcccaagagactcaacttcaagctcttcaacatccaggtcaaggaggtcacgacgaatgatggcaccacgaccatcgccaataaccttaccagcacggttcaggtctttacggactcggaataccagctcccgtacgtcctcggctctgcgcaccagggctgcctgcctccgttcccggcggacgtcttcatgattcctcagtacgggtacctgactctgaacaatggcagtcaggccgtgggccgttcctccttctactgcctggagtactttccttctcaaatgctgagaacgggcaacaactttgagttcagctacacgtttgaggacgtgccttttcacagcagctacgcgcacagccaaagcctggaccggctgatgaaccccctcatcgaccagtacctgtactacctgtctcggactcagaccacgggaggtaccgcaggaaatcggacgttgcaattttctcaggccgggcctagtagcatggcgaatcaggccaaaaactggctacccgggccctgctaccggcagcaacgcgtctccaagacaacgaatcaaaataacaacagcaactttgcctggaccggtgccaccaagtatcatctgaatggcagagactctctggtaaatcccggtgtcgctatggcaacccacaaggacgacgaagaccgattttttccgtccagcggagtcttaatatttgggaaacagggagctggaaatgacaacgtggaccttgacaacgttatgataaccagtgaggaagaaattaaaaccaccaacccagtggccacagaagagtacggcgtggtggccactaacctgcaatcggcaaacaccgctcctcaaacagggaccgtcaacagtcaaggagccttacctggcatggtctggcagaaccgggacgtgtacctgcagggtcctatctgggccaagattcctcacacggacggaaactttcatccctcgccgctgatgggaggctttggactgaaacacccgcctcctcagatcctgattaagaatacacctgttcccgcgaatcctccaactaccttcagtccagctaagtttgcgtcgttcatcacgcagtacagcaccggacaggtcagcgtggaaattgaatgggagctgcagaaagaaaacagcaaacgctggaacccagagattcaatacacttccaactacaacaaatctacaaatgtggactttgctgttgacacagaaggcgtttattctgagcctcgccccatcggcacccgttacctcacccgtaatctg

SEQ ID NO: 1458 - protein, 738 aa, Artificial Sequence
  Description of Artificial Sequence: Synthetic polypeptide
MAADGYLPDWLEDNLSEGIREWWDLKPGAPKPKANQQKQDDGRGLVLPGYKYLGPFNGLDKGEPVNAADAAALEHDKAYDQQLKAGDNPYLRYNHADAEFQERLQEDTSFGGNLGRAVFQAKKRVLEPLGLVEEGAKTAPGKKRPVEQSPQREPDSSTGIGKKGQQPAKKRLNFGQTGDSESVPDPQPLGEPPAAPSGVGSNTMAAGGGAPMADNNEGADGVGNSSGNWHCDSTWLGDRVITTSTRTWALPTYNNHLYKQISNGTSGGSTNDNTYFGYSTPWGYFDFNRFHCHFSPRDWQRLINNNWGFRPKRLNFKLFNIQVKEVTTNEGTKTIANNLTSTVQVFTDSEYQLPYVLGSAHQGCLPPFPADVFMIPQYGYLTLNNGSQAVGRSSFYCLEYFPSQMLRTGNNFQFSYTFEDVPFHSSYAHSQSLDRLMNPLIDQYLYYLSRTQTTGGTAGTQTLQFSQAGPSSMANQAKNWLPGPCYRQQRVSTTTNQNNNSNFAWTGATKYHLNGRDSLVNPGVAMATHKDDEDRFFPSSGVLIFGKQGAGNDNVDYSNVMITSEEEIKTTNPVATEEYGVVATNLQSANTAPQTGTVNSQGALPGMVWQNRDVYLQGPIWAKIPHTDGNFHPSPLMGGFGLKHPPPQILIKNTPVPADPPTTFNQAKLNSFITQYSTGQVSVEIEWELQKENSKRWNPEIQYTSNYYKSTNVDFAVNTEGVYSEPRPIGTRYLTRNL

SEQ ID NO: 1459 - DNA, 2214 bp, Artificial Sequence
  Description of Artificial Sequence: Synthetic polynucleotide
atggctgccgatggttatcttccagattggctcgaggacaacctctctgagggcattcgcgagtggtgggacctgaaacctggagccccgaaacccaaagccaaccagcaaaagcaggacgacggccggggtctggtgcttcctggctacaagtacctcggacccttcaacggactcgacaagggggagcccgtcaacgcggcggacgcagcggccctcgagcacgacaaggcctacgaccagcagctcaaagcgggtgacaatccgtacctgcggtataatcacgccgacgccgagtttcaggagcgtctgcaagaagatacgtcttttgggggcaacctcgggcgagcagtcttccaggccaagaagcgggttctcgaacctctcggtctggttgaggaaggcgctaagacggctcctggaaagaagagaccggtagagcagtcaccacagcgtgagcccgactcctccacgggcatcggcaagaaaggccagcagcccgccaaaaagagactcaatttcggtcagactggcgactcagagtcagtccccgaccctcaacctctcggagaacctccagcagcgccctctggtgtgggatctaatacaatggctgcaggcggtggcgcaccaatggcagacaataacgaaggtgccgacggagtgggtaattcctcgggaaattggcattgcgattccacatggctgggcgacagagtcatcaccaccagcacccgaacctgggccctgcccacctacaacaaccacctctacaagcaaatctccaacgggacctcgggaggcagcaccaacgacaacacctactttggctacagcaccccctgggggtattttgactttaacagattccactgccacttctcaccacgtgactggcagcgactcatcaacaacaactggggattccggcccaagagactcaacttcaagctcttcaacatccaggtcaaagaggtcacgacgaatgaaggcaccaagaccatcgccaataacctcaccagcaccgtccaggtgtttacggactcggaataccagctgccgtacgtcctcggctctgcccaccagggctgcctgcctccgttcccggcggacgtcttcatgattcctcagtacggctacctgactctcaacaacggtagtcaggccgtgggacgttcctccttctactgcctggagtacttcccctctcagatgctgagaacgggcaacaactttcaattcagctacactttcgaggacgtgcctttccacagcagctacgcgcacagccagagtttggacaggctgatgaatcctctcatcgaccagtacctgtactacctgtcaagaacccagactacgggaggcacagcgggaacccagacgttgcagttttctcaggccgggcctagcagcatggcgaatcaggccaaaaactggctgcctggaccctgctacagacagcagcgcgtctccacgacaacgaatcaaaacaacaacagcaactttgcctggactggtgccaccaagtatcatctgaacggcagagactctctggtgaatccgggcgtcgccatggcaacccacaaggacgacgaggaccgcttcttcccatccagcggcgtcctcatatttggcaagcagggagctggaaatgacaacgtggactatagcaacgtgatgataaccagcgaggaagaaatcaagaccaccaaccccgtggccacagaagagtatggcgtggtggctactaacctacagtcggcaaacaccgctcctcaaacggggaccgtcaacagccagggagccttacctggcatggtctggcagaaccgggacgtgtacctgcagggtcctatttgggccaagattcctcacacagatggcaactttcacccgtctcctttaatgggcggctttggacttaaacatccgcctcctcagatcctcatcaaaaacactcctgttcctgcggatcctccaacaacgttcaaccaggccaagctgaattctttcatcacgcagtacagcaccggacaagtcagcgtggagatcgagtgggagctgcagaaggagaacagcaagcgctggaacccagagattcagtatacttccaactactacaaatctacaaatgtggactttgctgttaatactgagggtgtttactctgagcctcgccccattggcactcgttacctcacccgtaatctg

SEQ ID NO: 1460 - protein, 738 aa, Artificial Sequence
  Description of Artificial Sequence: Synthetic polypeptide
MAADGYLPDWLEDNLSEGIREWWDLKPGAPKPKANQQKQDDGRGLVLPGYKYLGPFNGLDKGEPVNAADAAALEHDKAYDQQLKAGDNPYLRYNHADAEFQERLQEDTSFGGNLGRAVFQAKKRVLEPLGLVEEGAKTAPGKKRPVEQSPQREPDSSTGIGKKGQQPARKRLNFGQTGDSESVPDPQPLGEPPAAPSGVGSNTMAAGGGAPMADNNEGADGVGSSSGNWHCDSTWLGDRVITTSTRTWALPTYNNHLYKQISNGTSGGSTNDNTYFGYSTPWGYFDFNRFHCHFSPRDWQRLINNNWGFRPKRLNFKLFNIQVKEVTQNEGTKTIANNLTSTIQVFTDSEYQLPYVLGSAHQGCLPPFPADVFMIPQYGYLTLNNGSQAVGRSSFYCLEYFPSQMLRTGNNFQFSYTFEDVPFHSSYAHSQSLDRLMNPLIDQYLYYLSRTQTTGGTAGTQTLQFSQAGPSNMANQAKNWLPGPCYRQQRVSTTTSQNNNSNFAWTGATKYHLNGRDSLVNPGVAMATHKDDEDRFFPSSGILIFGKQGAGKDNVDYSNVMLTSEEEIKTTNPVATEEYGVVADNLQQQNTAPQIGTVNSQGALPGMVWQNRDVYLQGPIWAKIPHTDGNFHPSPLMGGFGLKHPPPQILIKNTPVPADPPTTFNQAKLNSFITQYSTGQVSVEIEWELQKENSKRWNPEIQYTSNYYKSTNVDFAVNTEGVYSEPRPIGTRYLTRNL

SEQ ID NO: 1461 - DNA, 2214 bp, Artificial Sequence
  Description of Artificial Sequence: Synthetic polynucleotide
atggctgccgatggttatcttccagattggctcgaggacaacctctctgagggcattcgcgagtggtgggacctgaaacctggagccccgaaacccaaagccaaccagcaaaagcaggacgacggccggggtctggtgcttcctggctacaagtacctcggacccttcaacggactcgacaagggggagcccgtcaacgcggcggacgcagcggccctcgagcacgacaaggcctacgaccagcagctcaaagcgggtgacaatccgtacctgcggtataatcacgccgacgccgagtttcaggagcgtctgcaagaagatacgtcttttgggggcaacctcgggcgagcagtcttccaggccaagaagcgggttctcgaacctctcggtctggttgaggaaggcgctaagacggctcctggaaagaagagaccggtagagcagtcaccacagcgtgagcccgactcctccacgggcatcggcaagaaaggccagcagcccgccagaaagagactcaatttcggtcagactggcgactcagagtcagtccccgaccctcaacctctcggagaacctccagcagcgccctctggtgtgggatctaatacaatggctgcaggcggtggcgcaccaatggcagacaataacgaaggtgccgacggagtgggtagttcctcgggaaattggcattgcgattccacatggctgggcgacagagtcatcaccaccagcacccgaacctgggccctgcccacctacaacaaccacctctacaagcaaatctccaacgggacctcgggaggcagcaccaacgacaacacctactttggctacagcaccccctgggggtattttgactttaacagattccactgccacttctcaccacgtgactggcagcgactcatcaacaacaactggggattccggcccaagagactcaacttcaagctcttcaacatccaggtcaaagaggtcacgcagaatgaaggcaccaagaccatcgccaataacctcaccagcaccatccaggtgtttacggactcggaataccagctgccgtacgtcctcggctctgcccaccagggctgcctgcctccgttcccggcggacgtcttcatgattcctcagtacggctacctgactctcaacaacggtagtcaggccgtgggacgttcctccttctactgcctggagtacttcccctctcagatgctgagaacgggcaacaactttcaattcagctacactttcgaggacgtgcctttccacagcagctacgcgcacagccagagtttggacaggctgatgaatcctctcatcgaccagtacctgtactacctgtcaagaacccagactacgggaggcacagcgggaacccagacgttgcagttttctcaggccgggcctagcaacatggcgaatcaggccaaaaactggctgcctggaccctgctacagacagcagcgcgtctccacgacaacgtcgcaaaacaacaacagcaactttgcctggactggtgccaccaagtatcatctgaacggcagagactctctggtgaatccgggcgtcgccatggcaacccacaaggacgacgaggaccgcttcttcccatccagcggcatcctcatatttggcaagcagggagctggaaaagacaacgtggactatagcaacgtgatgctaaccagcgaggaagaaatcaagaccaccaaccccgtggccacagaagagtatggcgtggtggctgataacctacagcagcaaaacaccgctcctcaaatagggaccgtcaacagccagggagccttacctggcatggtctggcagaaccgggacgtgtacctgcagggtcctatttgggccaagattcctcacacagatggcaactttcacccgtctcctttaatgggcggctttggacttaaacatccgcctcctcagatcctcatcaaaaacactcctgttcctgcggatcctccaacaacgttcaaccaggccaagctgaattctttcatcacgcagtacagcaccggacaagtcagcgtggagatcgagtgggagctgcagaaggagaacagcaagcgctggaacccagagattcagtatacttccaactactacaaatctacaaatgtggactttgctgttaatactgagggtgtttactctgagcctcgccccattggcactcgttacctcacccgtaatctg

SEQ ID NO: 1462 - protein, 738 aa, Artificial Sequence
  Description of Artificial Sequence: Synthetic polypeptide
MAADGYLPDWLEDNLSEGIREWWDLKPGAPKPKANQQKQDDGRGLVLPGYKYLGPFNGLDKGEPVNAADAAALEHDKAYDQQLKAGDNPYLRYNHADAEFQERLQEDTSFGGNLGRAVFQAKKRVLEPLGLVEEGAKTAPGKKRPVEPSPQRSPDSSTGIGKKGQQPARKRLNFGQTGDSESVPDPQPIGEPPAAPSGVGSGTMAAGGGAPMADNNEGADGVGSSSGNWHCDSTWLGDRVITTSTRTWALPTYNNHLYKQISNGTSGGSTNDNTYFGYSTPWGYFDFNRFHCHFSPRDWQRLINNNWGFRPKRLNFKLFNIQVKEVTQNEGTKTIANNLTSTIQVFTDSEYQLPYVLGSAHQGCLPPFPADVFMIPQYGYLTLNNGSQAVGRSSFYCLEYFPSQMLRTGNNFEFSYTFEDVPFHSSYAHSQSLDRLMNPLIDQYLYYLSRTQSTGGTAGTQQLLFSQAGPSNMSAQAKNWLPGPCYRQQRVSTTLSQNNNSNFAWTGATKYHLNGRDSLVNPGVAMATHKDDEDRFFPSSGILMFGKQGAGKDNVDYSNVMLTSEEEIKTTNPVATEQYGVVADNLQQQNTAPIVGAVNSQGALPGMVWQNRDVYLQGPIWAKIPHTDGNFHPSPLMGGFGLKHPPPQILIKNTPVPADPPTTFNQAKLNSFITQYSTGQVSVEIEWELQKENSKRWNPEIQYTSNYYKSTNVDFAVNTEGVYSEPRPIGTRYLTRNL

SEQ ID NO: 1463 - DNA, 2214 bp, Artificial Sequence
  Description of Artificial Sequence: Synthetic polynucleotide
atggctgccgatggttatcttccagattggctcgaggacaacctctctgagggcattcgcgagtggtgggacctgaaacctggagccccgaaacccaaagccaaccagcaaaagcaggacgacggccggggtctggtgcttcctggctacaagtacctcggacccttcaacggactcgacaagggggagcccgtcaacgcggcggacgcagcggccctcgagcacgacaaggcctacgaccagcagctcaaagcgggtgacaatccgtacctgcggtataatcacgccgacgccgagtttcaggagcgtctgcaagaagatacgtcttttgggggcaacctcgggcgagcagtcttccaggccaagaagcgggttctcgaacctctcggtctggttgaggaaggcgctaagacggctcctggaaagaagagaccggtagagccgtcaccacagcgttcccccgactcctccacgggcatcggcaagaaaggccagcagcccgccagaaagagactcaatttcggtcagactggcgactcagagtcagtccccgaccctcaacctatcggagaacctccagcagcgccctctggtgtgggatctggtacaatggctgcaggcggtggcgcaccaatggcagacaataacgaaggtgccgacggagtgggtagttcctcgggaaattggcattgcgattccacatggctgggcgacagagtcatcaccaccagcacccgaacctgggccctgcccacctacaacaaccacctctacaagcaaatctccaacgggacctcgggaggcagcaccaacgacaacacctactttggctacagcaccccctgggggtattttgactttaacagattccactgccacttctcaccacgtgactggcagcgactcatcaacaacaactggggattccggcccaagagactcaacttcaagctcttcaacatccaggtcaaagaggtcacgcagaatgaaggcaccaagaccatcgccaataacctcaccagcaccatccaggtgtttacggactcggaataccagctgccgtacgtcctcggctctgcccaccagggctgcctgcctccgttcccggcggacgtcttcatgattcctcagtacggctacctgactctcaacaacggtagtcaggccgtgggacgttcctccttctactgcctggagtacttcccctctcagatgctgagaacgggcaacaactttgagttcagctacactttcgaggacgtgcctttccacagcagctacgcgcacagccagagtttggacaggctgatgaatcctctcatcgaccagtacctgtactacctgtcaagaacccagtctacgggaggcacagcgggaacccagcagttgctgttttctcaggccgggcctagcaacatgtcggctcaggccaaaaactggctgcctggaccctgctacagacagcagcgcgtctccacgacactgtcgcaaaacaacaacagcaactttgcctggactggtgccaccaagtatcatctgaacggcagagactctctggtgaatccgggcgtcgccatggcaacccacaaggacgacgaggaccgcttcttcccatccagcggcatcctcatgtttggcaagcagggagctggaaaagacaacgtggactatagcaacgtgatgctaaccagcgaggaagaaatcaagaccaccaaccccgtggccacagaacagtatggcgtggtggctgataacctacagcagcaaaacaccgctcctattgtgggggccgtcaacagccagggagccttacctggcatggtctggcagaaccgggacgtgtacctgcagggtcctatttgggccaagattcctcacacagatggcaactttcacccgtctcctttaatgggcggctttggacttaaacatccgcctcctcagatcctcatcaaaaacactcctgttcctgcggatcctccaacaacgttcaaccaggccaagctgaattctttcatcacgcagtacagcaccggacaagtcagcgtggagatcgagtgggagctgcagaaggagaacagcaagcgctggaacccagagattcagtatacttccaactactacaaatctacaaatgtggactttgctgttaatactgagggtgtttactctgagcctcgccccattggcactcgttacctcacccgtaatctg

SEQ ID NO: 1464 - protein, 738 aa, Artificial Sequence
  Description of Artificial Sequence: Synthetic polypeptide
MAADGYLPDWLEDNLSEGIREWWDLKPGAPKPKANQQKQDDGRGLVLPGYKYLGPFNGLDKGEPVNAADAAALEHDKAYDQQLKAGDNPYLRYNHADAEFQERLQEDTSFGGNLGRAVFQAKKRVLEPLGLVEEGAKTAPGKKRPVEPSPQRSPDSSTGIGKKGQQPAKKRLNFGQTGDSESVPDPQPIGEPPAGPSGLGSGTMAAGGGAPMADNNEGADGVGSSSGNWHCDSTWLGDRVITTSTRTWALPTYNNHLYKQISNGTSGGSTNDNTYFGYSTPWGYFDFNRFHCHFSPRDWQRLINNNWGFRPKRLNFKLFNIQVKEVTQNEGTKTIANNLTSTIQVFTDSEYQLPYVLGSAHQGCLPPFPADVFMIPQYGYLTLNNGSQAVGRSSFYCLEYFPSQMLRTGNNFEFSYTFEDVPFHSSYAHSQSLDRLMNPLIDQYLYYLSRTQSTGGTAGTQQLLFSQAGPSNMSAQAKNWLPGPCYRQQRVSTTLSQNNNSNFAWTGATKYHLNGRDSLVNPGVAMATHKDDEERFFPSSGVLMFGKQGAGKDNVDYSSVMLTSEEEIKTTNPVATEQYGVVADNLQQQNTAPIVGAVNSQGALPGMVWQNRDVYLQGPIWAKIPHTDGNFHPSPLMGGFGLKHPPPQILIKNTPVPADPPTTFSQAKLASFITQYSTGQVSVEIEWELQKENSKRWNPEIQYTSNYYKSTNVDFAVNTEGTYSEPRPIGTRYLTRNL

SEQ ID NO: 1465 - DNA, 2214 bp, Artificial Sequence
  Description of Artificial Sequence: Synthetic polynucleotide
atggctgccgatggttatcttccagattggctcgaggacaacctctctgagggcattcgcgagtggtgggacttgaaacctggagccccgaaacccaaagccaaccagcaaaagcaggacgacggccggggtctggtgcttcctggctacaagtacctcggacccttcaacggactcgacaagggggagcccgtcaacgcggcggacgcagcggccctcgagcacgacaaggcctacgaccagcagctcaaagcgggtgacaatccgtacctgcggtataaccacgccgacgccgagtttcaggagcgtctgcaagaagatacgtcttttgggggcaacctcgggcgagcagtcttccaggccaagaagcgggttctcgaacctctcggtctggttgaggaaggcgctaagacggctcctggaaagaagagaccggtagagccatcaccccagcgttctccagactcctctacgggcatcggcaagaaaggccagcagcccgcgaaaaagagactcaactttgggcagactggcgactcagagtcagtgcccgaccctcaaccaatcggagaaccccccgcaggcccctctggtctgggatctggtacaatggctgcaggcggtggcgctccaatggcagacaataacgaaggcgccgacggagtgggtagttcctcaggaaattggcattgcgattccacatggctgggcgacagagtcatcaccaccagcacccgaacctgggccctccccacctacaacaaccacctctacaagcaaatctccaacgggacttcgggaggaagcaccaacgacaacacctacttcggctacagcaccccctgggggtattttgactttaacagattccactgccacttctcaccacgtgactggcagcgactcatcaacaacaactggggattccggcccaagagactcaacttcaagctcttcaacatccaggtcaaggaggtcacgcagaatgaaggcaccaagaccatcgccaataaccttaccagcacgattcaggtctttacggactcggaataccagctcccgtacgtcctcggctctgcgcaccagggctgcctgcctccgttcccggcggacgtcttcatgattcctcagtacgggtacctgactctgaacaatggcagtcaggccgtgggccgttcctccttctactgcctggagtactttccttctcaaatgctgagaacgggcaacaactttgagttcagctacacgtttgaggacgtgccttttcacagcagctacgcgcacagccaaagcctggaccggctgatgaaccccctcatcgaccagtacctgtactacctgtctcggactcagtccacgggaggtaccgcaggaactcagcagttgctattttctcaggccgggcctagtaacatgtcggctcaggccaaaaactggctacccgggccctgctaccggcagcaacgcgtctccacgacactgtcgcaaaataacaacagcaactttgcctggaccggtgccaccaagtatcatctgaatggcagagactctctggtaaatcccggtgtcgctatggcaacccacaaggacgacgaagagcgattttttccgtccagcggagtcttaatgtttgggaaacagggagctggaaaagacaacgtggactatagcagcgttatgctaaccagtgaggaagaaattaaaaccaccaacccagtggccacagaacagtacggcgtggtggccgataacctgcaacagcaaaacaccgctcctattgtaggggccgtcaacagtcaaggagccttacctggcatggtctggcagaaccgggacgtgtacctgcagggtcctatctgggccaagattcctcacacggacggaaactttcatccctcgccgctgatgggaggctttggactgaaacacccgcctcctcagatcctgattaagaatacacctgttcccgcggatcctccaactaccttcagtcaagctaagctggcgtcgttcatcacgcagtacagcaccggacaggtcagcgtggaaattgaatgggagctgcagaaagaaaacagcaaacgctggaacccagagattcaatacacttccaactactacaaatctacaaatgtggactttgctgttaacacagaaggcacttattctgagcctcgccccatcggcacccgttacctcacccgtaatctg

SEQ ID NO: 1466 - protein, 737 aa, Artificial Sequence
  Description of Artificial Sequence: Synthetic polypeptide
MAADGYLPDWLEDNLSEGIREWWDLKPGAPKPKANQQKQDDGRGLVLPGYKYLGPFNGLDKGEPVNAADAAALEHDKAYDQQLKAGDNPYLRYNHADAEFQERLQEDTSFGGNLGRAVFQAKKRVLEPLGLVEEGAKTAPGKKRPVEPSPQRSPDSSTGIGKKGQQPAKKRLNFGQTGDSESVPDPQPLGEPPAAPSGVGSGTMAAGGGAPMADNNEGADGVGNASGNWHCDSTWLGDRVITTSTRTWALPTYNNHLYKQISSQSAGSTNDNTYFGYSTPWGYFDFNRFHCHFSPRDWQRLINNNWGFRPKKLRFKLFNIQVKEVTTNDGVTTIANNLTSTVQVFSDSEYQLPYVLGSAHQGCLPPFPADVFMIPQYGYLTLNNGSQSVGRSSFYCLEYFPSQMLRTGNNFEFSYTFEDVPFHSSYAHSQSLDRLMNPLIDQYLYYLARTQSTTGGTAGNRELQFYQAGPSTMAEQAKNWLPGPCYRQQRVSKTLDQNNNSNFAWTGATKYHLNGRNSLVNPGVAMATHKDDEDRFFPSSGVLIFGKTGAANKTTLENVLMTNEEEIKTTNPVATEEYGVVSSNLQSANTAPQTQTVNSQGALPGMVWQNRDVYLQGPIWAKIPHTDGNFHPSPLMGGFGLKHPPPQILIKNTPVPANPPEVFTPAKFASFITQYSTGQVSVEIEWELQKENSKRWNPEIQYTSNYDKSTNVDFAVDSEGVYSEPRPIGTRYLTRNL

SEQ ID NO: 1467 - DNA, 2211 bp, Artificial Sequence
  Description of Artificial Sequence: Synthetic polynucleotide
atggctgccgatggttatcttccagattggctcgaggacaacctctctgagggcattcgcgagtggtgggacctgaaacctggagccccgaaacccaaagccaaccagcaaaagcaggacgacggccggggtctggtgcttcctggctacaagtacctcggacccttcaacggactcgacaagggggagcccgtcaacgcggcggacgcagcggccctcgagcacgacaaggcctacgaccagcagctcaaagcgggtgacaatccgtacctgcggtataaccacgccgacgccgagtttcaggagcgtctgcaagaagatacgtcatttgggggcaacctcgggcgagcagtcttccaggccaagaagcgggttctcgaacctctcggtctggttgaggaaggcgctaagacggctcctggaaagaagagaccggtagagccgtcacctcagcgttcccccgactcctccacgggcatcggcaagaaaggccagcagcccgccaaaaagagactcaatttcggtcagactggcgactcagagtcagtccccgaccctcaacctctcggagaacctccagcagcgccctctggtgtgggatctggtacaatggctgcaggcggtggcgcaccaatggcagacaataacgaaggtgccgacggagtgggtaatgcctcaggaaattggcattgcgattccacatggctgggcgacagagtcattaccaccagcacccgaacctgggccctgcccacctacaacaaccacctctacaagcaaatctccagtcaaagtgcaggtagtaccaacgacaacacctacttcggctacagcaccccctgggggtattttgactttaacagattccactgccacttctcaccacgtgactggcagcgactcatcaacaacaactggggattccggcccaagaagctgcggttcaagctcttcaacatccaggtcaaggaggtcacgacgaatgacggcgttacgaccatcgctaataaccttaccagcacggttcaggtattctcggactcggaataccagctgccgtacgtcctcggctctgcgcaccagggctgcctgcctccgttcccggcggacgtcttcatgattcctcagtacggctacctgactctcaacaatggcagtcagtctgtgggacgttcctccttctactgcctggagtacttcccctctcagatgctgagaacgggcaacaactttgagttcagctacaccttcgaggacgtgcctttccacagcagctacgcacacagccagagcctggaccggctgatgaatcccctcatcgaccagtacttgtactacctggccagaacacagagtaccacaggaggcacagctggcaatcgggaactgcagttttaccaggccgggccttcaactatggccgaacaagccaagaattggttacctggaccttgctaccggcaacaaagagtctccaaaacgctggatcaaaacaacaacagcaactttgcttggactggtgccaccaaatatcacctgaacggcagaaactcgttggttaatcccggcgtcgccatggcaactcacaaggacgacgaggaccgctttttcccatccagcggagtcctgatttttggaaaaactggagcagctaacaaaactacattggaaaatgtgttaatgacaaatgaagaagaaattaaaactactaatcctgtagccacggaagaatacggggtagtcagcagcaacttacaatcggctaatactgcaccccagacacaaactgtcaacagccagggagccttacctggcatggtctggcagaaccgggacgtgtacctgcagggtcccatctgggccaagattcctcacacggatggcaactttcacccgtctcctttgatgggcggctttggacttaaacatccgcctcctcagatcctgatcaagaacactcccgttcccgctaatcctccggaggtgtttactcctgccaagtttgcttcgttcatcacacagtacagcaccggacaagtcagcgtggaaatcgagtgggagctgcagaaggaaaacagcaagcgctggaacccggagattcagtacacctccaactatgataagtcgactaatgtggactttgccgttgacagcgagggtgtttactctgagcctcgccctattggcactcgttacctcacccgtaatctg

SEQ ID NO: 1468 - protein, 735 aa, Artificial Sequence
  Description of Artificial Sequence: Synthetic polypeptide
MAADGYLPDWLEDNLSEGIREWWDLKPGAPKPKANQQKQDDGRGLVLPGYKYLGPFNGLDKGEPVNAADAAALEHDKAYDQQLKAGDNPYLRYNHADAEFQERLQEDTSFGGNLGRAVFQAKKRVLEPLGLVEEGAKTAPGKKRPVEQSPQEPDSSSGIGKSGQQPAKKRLNFGQTGDSESVPDPQPLGEPPAAPSGVGSNTMASGGGAPMADNNEGADGVGNASGNWHCDSTWLGDRVITTSTRTWALPTYNNHLYKQISSQSGASNDNHYFGYSTPWGYFDFNRFHCHFSPRDWQRLINNNWGFRPKRLNFKLFNIQVKEVTTNDGTTTIANNLTSTVQVFTDSEYQLPYVLGSAHQGCLPPFPADVFMIPQYGYLTLNNGSQAVGRSSFYCLEYFPSQMLRTGNNFTFSYTFEDVPFHSSYAHSQSLDRLMNPLIDQYLYYLSRTQTTSGTAQNRELQFSQAGPSSMANQAKNWLPGPCYRQQRVSKTANDNNNSNFAWTGATKYHLNGRDSLVNPGPAMASHKDDEDKFFPMSGVLIFGKQGAGASNVDLDNVMITDEEEIKTTNPVATEQYGTVATNLQSSNTAPATGTVNSQGALPGMVWQDRDVYLQGPIWAKIPHTDGHFHPSPLMGGFGLKHPPPQILIKNTPVPANPPTTFSPAKFASFITQYSTGQVSVEIEWELQKENSKRWNPEIQYTSNYNKSANVDFTVDTNGVYSEPRPIGTRYLTRNL

SEQ ID NO: 1469 - DNA, 2205 bp, Artificial Sequence
  Description of Artificial Sequence: Synthetic polynucleotide
atggctgccgatggttatcttccagattggctcgaggacaacctctctgagggcattcgcgagtggtgggacttgaaacctggagccccgaaacccaaagccaaccagcaaaagcaggacgacggccggggtctggtgcttcctggctacaagtacctcggacccttcaacggactcgacaagggggagcccgtcaacgcggcggatgcagcggccctcgagcacgacaaggcctacgaccagcagctcaaagcgggtgacaatccgtacctgcggtataaccacgccgacgccgagtttcaggagcgtctgcaagaagatacgtcttttgggggcaacctcgggcgagcagtcttccaggccaagaagagggttctcgaacctcttggtctggttgaggaaggtgctaagacggctcctggaaagaaacgtccggtagagcagtcgccacaagagccagactcctcctcgggcattggcaagtcaggccagcagcccgctaaaaagagactcaattttggtcagactggcgactcagagtcagtccccgacccacaacctctcggagaacctccagcagccccctctggtgtgggatctaatacaatggcttcaggcggtggcgcaccaatggcagacaataacgaaggcgccgacggagtgggtaatgcctcaggaaattggcattgcgattccacatggctgggcgacagagtcatcaccaccagcacccgaacatgggccttgcccacctataacaaccacctctacaagcaaatctccagtcaatcaggggccagcaacgacaaccactacttcggctacagcaccccctgggggtattttgatttcaacagattccactgccatttctcaccacgtgactggcagcgactcatcaacaacaattggggattccggcccaagagactcaacttcaagctcttcaacatccaagtcaaggaggtcacgacgaatgatggcaccacgaccatcgctaataaccttaccagcacggttcaagtcttcacggactcggagtaccagttgccgtacgtcctcggctctgcgcaccagggctgcctccctccgttcccggcggacgtgttcatgattccgcagtacggctacctaacgctcaacaatggcagccaggcagtgggacggtcatccttttactgcctggaatatttcccatcgcagatgctgagaacgggcaataactttaccttcagctacaccttcgaggacgtgcctttccacagcagctacgcgcacagccagagcctggaccggctgatgaatcctctcatcgaccagtacctgtattacctgagcagaactcagactacgtccggaactgcccaaaacagggagttgcagtttagccaggcgggtccatctagcatggctaatcaggccaaaaactggctacctggaccctgttaccggcagcagcgcgtttctaaaacagcaaatgacaacaacaacagcaactttgcctggactggtgctacaaaatatcaccttaatgggcgtgattctttagtcaaccctggccctgctatggcctcacacaaagacgacgaagacaagttctttcccatgagcggtgtcttgatttttggaaagcagggcgccggagcttcaaacgttgatttggacaatgtcatgatcacagacgaagaggaaatcaaaaccactaaccccgtggccaccgaacaatatgggactgtggcaaccaatctccagagcagcaacacagcccctgcgaccggaactgtgaattctcagggagccttacctggaatggtgtggcaagacagagacgtatacctgcagggtcctatttgggccaaaattcctcacacggatggacactttcacccgtctcctctcatgggcggctttggacttaagcacccgcctcctcagatcctcatcaaaaacacgcctgttcctgcgaatcctccgacaacgttttcgcctgcaaagtttgcttcattcatcacccagtattccacaggacaagtgagcgtggagattgaatgggagctgcagaaagaaaacagcaaacgctggaatcccgaaatacagtatacatctaactataataaatctgccaacgttgatttcactgtggacaccaatggagtttatagtgagcctcgccccattggcacccgttacctcacccgtaacctg

SEQ ID NO: 1470 - protein, 735 aa, Artificial Sequence
  Description of Artificial Sequence: Synthetic polypeptide
MAADGYLPDWLEDNLSEGIREWWDLKPGAPQPKANQQHQDDGRGLVLPGYKYLGPFNGLDKGEPVNEADAAALEHDKAYDQQLKAGDNPYLKYNHADAEFQERLQEDTSFGGNLGRAVFQAKKRVLEPLGLVEEAAKTAPGKKRPVEQSPQEPDSSSGIGKSGQQPARKRLNFGQTGDSESVPDPQPLGEPPAAPSGVGSNTMASGGGAPMADNNEGADGVGNSSGNWHCDSTWLGDRVITTSTRTWALPTYNNHLYKQISSQSGASNDNHYFGYSTPWGYFDFNRFHCHFSPRDWQRLINNNWGFRPKKLNFKLFNIQVKEVTQNDGTTTIANNLTSTVQVFTDSEYQLPYVLGSAHQGCLPPFPADVFMIPQYGYLTLNNGSQAVGRSSFYCLEYFPSQMLRTGNNFTFSYTFEDVPFHSSYAHSQSLDRLMNPLIDQYLYYLSRTQTTSGTTQQSRLQFSQAGPSSMAQQAKNWLPGPCYRQQRVSKTANDNNNSNFAWTGATKYHLNGRDSLVNPGPAMASHKDDEEKFFPMHGVLIFGKQGTGASNVDLDNVMITDEEEIRTTNPVATEQYGTVATNLQSSNTAPATGTVNSQGALPGMVWQDRDVYLQGPIWAKIPHTDGHFHPSPLMGGFGLKHPPPQILIKNTPVPANPPTTFSPAKFASFITQYSTGQVSVEIEWELQKENSKRWNPEIQYTSNYNKSVNVDFTVDTNGVYSEPRPIGTRYLTRNL

SEQ ID NO: 1471 - DNA, 2205 bp, Artificial Sequence
  Description of Artificial Sequence: Synthetic polynucleotide
atggctgctgacggttatcttccagattggctcgaggacaacctttctgaaggcattcgtgagtggtgggatctgaaacctggagcccctcaacccaaagcgaaccaacaacaccaggacgacggtcggggtcttgtgcttccgggttacaaatacctcggaccctttaacggactcgacaaaggagagccggtcaacgaggcggacgcggcagccctcgaacacgacaaagcttacgaccagcagctcaaggccggtgacaacccgtacctcaagtacaaccacgccgacgccgagtttcaggagcgtcttcaagaagatacgtcttttgggggcaaccttggcagagcagtcttccaggccaaaaagagggtccttgagcctcttggtctggttgaggaagcagctaaaacggctcctggaaagaagaggcctgtagaacagtctcctcaggaaccggactcatcatctggtattggcaaatcgggccaacagcctgccagaaaaagactaaatttcggtcagactggagactcagagtcagtcccagaccctcaacctctcggagaaccaccagcagccccctcaggtgtgggatctaatacaatggcttcaggcggtggcgcaccaatggcagacaataacgagggtgccgatggagtgggtaattcctcaggaaattggcattgcgattccacatggctgggcgacagagtcatcaccaccagcaccagaacctgggccctgcccacttacaacaaccatctctacaagcaaatctccagccaatcaggagcttcaaacgacaaccactactttggctacagcaccccttgggggtattttgactttaacagattccactgccacttctcaccacgtgactggcagcgactcattaacaacaactggggattccggcccaagaaactcaacttcaagctcttcaacatccaagttaaagaggtcacgcagaacgatggcacgacgactattgccaataaccttaccagcacggttcaagtgtttacggactcggagtatcagctcccgtacgtgctcgggtcggcgcaccaaggctgtctcccgccgtttccagcggacgtcttcatgatccctcagtatggatacctcaccctgaacaacggaagtcaagcggtgggacgctcatccttttactgcctggagtacttcccttcgcagatgctaaggactggaaataacttcacattcagctataccttcgaggatgtaccttttcacagcagctacgctcacagccagagtttggatcgcttgatgaatcctcttattgatcagtatctgtactacctgagcagaacgcaaacaacctctggaacaacccaacaatcacggctgcaatttagccaggctgggccttcgtctatggctcagcaggccaaaaattggctacctgggccctgctaccggcaacagagagtttcaaagactgctaacgacaacaacaacagtaactttgcttggacaggggccaccaaatatcatctcaatggccgcgactcgctggtgaatccaggaccagctatggccagtcacaaggacgatgaagaaaaatttttccctatgcacggcgttctaatatttggcaaacaagggacaggggcaagtaacgtagatttagataatgtaatgattacggatgaagaagagattcgtaccaccaatcctgtggcaacagagcagtatggaactgtggcaactaacttgcagagctcaaatacagctcccgcgactggaactgtcaatagtcagggggccttacctggcatggtgtggcaagatcgtgacgtgtaccttcaaggacctatctgggcaaagattcctcacacggatggacactttcatccttctcctctgatgggaggctttggactgaaacatccgcctcctcaaatcttgatcaaaaatactccggtaccggcaaatcctccgacgactttcagcccggccaagtttgcttcatttatcactcagtactccactggacaggtcagcgtggaaattgagtgggagctacagaaagaaaacagcaaacgttggaatccagagattcagtacacttccaactacaacaagtctgttaatgtggactttactgtagacactaatggtgtttatagtgaacctcgccctattggaacccggtatctcacacgaaacttg

SEQ ID NO: 1472 - protein, 736 aa, Artificial Sequence
  Description of Artificial Sequence: Synthetic polypeptide
MAADGYLPDWLEDNLSEGIREWWDLKPGAPKPKANQQKQDDGRGLVLPGYKYLGPFNGLDKGEPVNAADAAALEHDKAYDQQLKAGDNPYLRYNHADAEFQERLQEDTSFGGNLGRAVFQAKKRVLEPLGLVEEGAKTAPGKKRPVEQSPQEPDSSSGIGKKGQQPARKRLNFGQTGDSESVPDPQPLGEPPAAPSGVGSNTMAAGGGAPMADNNEGADGVGNASGNWHCDSTWLGDRVITTSTRTWALPTYNNHLYKQISSQSGGSTNDNTYFGYSTPWGYFDFNRFHCHFSPRDWQRLINNNWGFRPKRLNFKLFNIQVKEVTTNDGTTTIANNLTSTVQVFTDSEYQLPYVLGSAHQGCLPPFPADVFMIPQYGYLTLNNGSQAVGRSSFYCLEYFPSQMLRTGNNFEFSYTFEDVPFHSSYAHSQSLDRLMNPLIDQYLYYLSRTQTTSGTAGNRTLQFSQAGPSSMANQAKNWLPGPCYRQQRVSKTANQNNNSNFAWTGATKYHLNGRDSLVNPGPAMATHKDDEDKFFPMSGVLIFGKQGAGNSNVDLDNVMITNEEEIKTTNPVATEQYGTVATNLQSANTAPATGTVNSQGALPGMVWQDRDVYLQGPIWAKIPHTDGHFHPSPLMGGFGLKHPPPQILIKNTPVPANPPTTFSPAKFASFITQYSTGQVSVEIEWELQKENSKRWNPEIQYTSNYNKSTNVDFAVDTNGVYSEPRPIGTRYLTRNL

SEQ ID NO: 1473 - protein, 736 aa, Artificial Sequence
  Description of Artificial Sequence: Synthetic polypeptide
MAADGYLPDWLEDNLSEGIREWWDLKPGAPKPKANQQKQDDGRGLVLPGYKYLGPFNGLDKGEPVNAADAAALEHDKAYDQQLKAGDNPYLRYNHADAEFQERLQEDTSFGGNLGRAVFQAKKRVLEPLGLVEEGAKTAPGKKRPVEQSPQEPDSSSGIGKKGQQPAKKRLNFGQTGDSESVPDPQPLGEPPAAPSGVGSNTMASGGGAPMADNNEGADGVGNASGNWHCDSTWLGDRVITTSTRTWALPTYNNHLYKQISSQSGASTNDNTYFGYSTPWGYFDFNRFHCHFSPRDWQRLINNNWGFRPKRLNFKLFNIQVKEVTTNDGTTTIANNLTSTVQVFTDSEYQLPYVLGSAHQGCLPPFPADVFMIPQYGYLTLNNGSQAVGRSSFYCLEYFPSQMLRTGNNFQFSYTFEDVPFHSSYAHSQSLDRLMNPLIDQYLYYLSRTQTTSGTAGNRELQFSQAGPSSMANQAKNWLPGPCYRQQRVSKTTNQNNNSNFAWTGATKYHLNGRDSLVNPGPAMATHKDDEDKFFPMSGVLIFGKQGAGNSNVDLDNVMITNEEEIKTTNPVATEEYGTVATNLQSANTAPATGTVNSQGALPGMVWQNRDVYLQGPIWAKIPHTDGHFHPSPLMGGFGLKHPPPQILIKNTPVPANPPTTFSPAKFASFITQYSTGQVSVEIEWELQKENSKRWNPEIQYTSNYNKSTNVDFAVDTNGVYSEPRPIGTRYLTRNL

SEQ ID NO: 1474 - protein, 736 aa, Artificial Sequence
  Description of Artificial Sequence: Synthetic polypeptide
MAADGYLPDWLEDNLSEGIREWWDLKPGAPKPKANQQKQDDGRGLVLPGYKYLGPFNGLDKGEPVNAADAAALEHDKAYDQQLKAGDNPYLRYNHADAEFQERLQEDTSFGGNLGRAVFQAKKRVLEPLGLVEEGAKTAPGKKRPVEQSPQEPDSSSGIGKKGQQPARKRLNFGQTGDSESVPDPQPLGEPPAAPSGVGSNTMAAGGGAPMADNNEGADGVGNASGNWHCDSTWLGDRVITTSTRTWALPTYNNHLYKQISSQSGGSTNDNTYFGYSTPWGYFDFNRFHCHFSPRDWQRLINNNWGFRPKRLNFKLFNIQVKEVTTNDGTTTIANNLTSTVQVFTDSEYQLPYVLGSAHQGCLPPFPADVFMIPQYGYLTLNNGSQAVGRSSFYCLEYFPSQMLRTGNNFEFSYTFEDVPFHSSYAHSQSLDRLMNPLIDQYLYYLSRTQTTSGTAGNRELQFSQAGPSSMANQAKNWLPGPCYRQQRVSKTTNQNNNSNFAWTGATKYHLNGRDSLVNPGPAMATHKDDEDKFFPMSGVLIFGKQGAGNSNVDLDNVMITSEEEIKTTNPVATEEYGTVATNLQSSNTAPATGTVNSQGALPGMVWQERDVYLQGPIWAKIPHTDGHFHPSPLMGGFGLKHPPPQILIKNTPVPANPPTTFSPAKFASFITQYSTGQVSVEIEWELQKENSKRWNPEIQYTSNYNKSTNVDFAVDTNGVYSEPRPIGTRYLTRNL

SEQ ID NO: 1475 - protein, 736 aa, Artificial Sequence
  Description of Artificial Sequence: Synthetic polypeptide
MAADGYLPDWLEDNLSEGIREWWDLKPGAPKPKANQQKQDDGRGLVLPGYKYLGPFNGLDKGEPVNAADAAALEHDKAYDQQLKAGDNPYLRYNHADAEFQERLQEDTSFGGNLGRAVFQAKKRVLEPLGLVEEGAKTAPGKKRPVEQSPQEPDSSSGIGKKGQQPARKRLNFGQTGDSESVPDPQPLGEPPAAPSGVGSNTMASGGGAPMADNNEGADGVGNASGNWHCDSTWLGDRVITTSTRTWALPTYNNHLYKQISSQSGGSTNDNTYFGYSTPWGYFDFNRFHCHFSPRDWQRLINNNWGFRPKKLNFKLFNIQVKEVTTNDGTTTIANNLTSTVQVFTDSEYQLPYVLGSAHQGCLPPFPADVFMIPQYGYLTLNNGSQAVGRSSFYCLEYFPSQMLRTGNNFEFSYTFEDVPFHSSYAHSQSLDRLMNPLIDQYLYYLSRTQTTSGTAGNRELQFSQAGPSSMANQAKNWLPGPCYRQQRVSKTTNQNNNSNFAWTGATKYHLNGRDSLVNPGPAMATHKDDEDKFFPMSGVLIFGKQGAGNSNVDLDNVMITSEEEIKTTNPVATEEYGTVATNLQSANTAPATGTVNSQGALPGMVWQDRDVYLQGPIWAKIPHTDGHFHPSPLMGGFGLKHPPPQILIKNTPVPANPPTTFSPAKFASFITQYSTGQVSVEIEWELQKENSKRWNPEIQYTSNYNKSTNVDFAVDTNGVYSEPRPIGTRYLTRNL

SEQ ID NO: 1476 - protein, 736 aa, Artificial Sequence
  Description of Artificial Sequence: Synthetic polypeptide
MAADGYLPDWLEDNLSEGIREWWDLKPGAPKPKANQQKQDDGRGLVLPGYKYLGPFNGLDKGEPVNAADAAALEHDKAYDQQLKAGDNPYLRYNHADAEFQERLQEDTSFGGNLGRAVFQAKKRVLEPLGLVEEGAKTAPGKKRPVEQSPQEPDSSSGIGKKGQQPARKRLNFGQTGDSESVPDPQPLGEPPAAPSGVGSNTMAAGGGAPMADNNEGADGVGNASGNWHCDSTWLGDRVITTSTRTWALPTYNNHLYKQISSQSGGSTNDNTYFGYSTPWGYFDFNRFHCHFSPRDWQRLINNNWGFRPKKLNFKLFNIQVKEVTTNDGTTTIANNLTSTVQVFTDSEYQLPYVLGSAHQGCLPPFPADVFMIPQYGYLTLNNGSQAVGRSSFYCLEYFPSQMLRTGNNFQFSYTFEDVPFHSSYAHSQSLDRLMNPLIDQYLYYLSRTQTTSGTAGNRTLQFSQAGPSSMANQAKNWLPGPCYRQQRVSKTTNQNNNSNFAWTGATKYHLNGRDSLVNPGPAMATHKDDEDKFFPMSGVLIFGKQGAGNSNVDLDNVMITNEEEIKTTNPVATEEYGTVATNLQSANTAPATGTVNSQGALPGMVWQDRDVYLQGPIWAKIPHTDGHFHPSPLMGGFGLKHPPPQILIKNTPVPANPPTTFSPAKFASFITQYSTGQVSVEIEWELQKENSKRWNPEIQYTSNYNKSTNVDFAVDTNGVYSEPRPIGTRYLTRNL

SEQ ID NO: 1477 - protein, 736 aa, Artificial Sequence
  Description of Artificial Sequence: Synthetic polypeptide
MAADGYLPDWLEDNLSEGIREWWDLKPGAPKPKANQQKQDDGRGLVLPGYKYLGPFNGLDKGEPVNAADAAALEHDKAYDQQLKAGDNPYLRYNHADAEFQERLQEDTSFGGNLGRAVFQAKKRVLEPLGLVEEGAKTAPGKKRPVEQSPQEPDSSSGIGKKGQQPAKKRLNFGQTGDSESVPDPQPLGEPPAAPSGVGSNTMAAGGGAPMADNNEGADGVGNASGNWHCDSTWLGDRVITTSTRTWALPTYNNHLYKQISSQSGGSTNDNTYFGYSTPWGYFDFNRFHCHFSPRDWQRLINNNWGFRPKKLNFKLFNIQVKEVTTNDGTTTIANNLTSTVQVFTDSEYQLPYVLGSAHQGCLPPFPADVFMIPQYGYLTLNNGSQAVGRSSFYCLEYFPSQMLRTGNNFEFSYTFEDVPFHSSYAHSQSLDRLMNPLIDQYLYYLSRTQTTSGTAGNRTLQFSQAGPSSMANQAKNWLPGPCYRQQRVSKTANQNNNSNFAWTGATKYHLNGRDSLVNPGPAMATHKDDEDKFFPMSGVLIFGKQGAGNSNVDLDNVMITSEEEIKTTNPVATEQYGTVATNLQSSNTAPATGTVNSQGALPGMVWQNRDVYLQGPIWAKIPHTDGHFHPSPLMGGFGLKHPPPQILIKNTPVPANPPTTFSPAKFASFITQYSTGQVSVEIEWELQKENSKRWNPEIQYTSNYNKSTNVDFAVDTNGVYSEPRPIGTRYLTRNL

SEQ ID NO: 1478 - protein, 736 aa, Artificial Sequence
  Description of Artificial Sequence: Synthetic polypeptide
MAADGYLPDWLEDNLSEGIREWWDLKPGAPKPKANQQKQDDGRGLVLPGYKYLGPFNGLDKGEPVNAADAAALEHDKAYDQQLKAGDNPYLRYNHADAEFQERLQEDTSFGGNLGRAVFQAKKRVLEPLGLVEEGAKTAPGKKRPVEQSPQEPDSSSGIGKKGQQPAKKRLNFGQTGDSESVPDPQPLGEPPAAPSGVGSNTMASGGGAPMADNNEGADGVGNASGNWHCDSTWLGDRVITTSTRTWALPTYNNHLYKQISSQSGGSTNDNTYFGYSTPWGYFDFNRFHCHFSPRDWQRLINNNWGFRPKKLNFKLFNIQVKEVTTNDGTTTIANNLTSTVQVFTDSEYQLPYVLGSAHQGCLPPFPADVFMIPQYGYLTLNNGSQAVGRSSFYCLEYFPSQMLRTGNNFEFSYTFEDVPFHSSYAHSQSLDRLMNPLIDQYLYYLSRTQTTSGTAGNRTLQFSQAGPSSMANQAKNWLPGPCYRQQRVSKTANQNNNSNFAWTGATKYHLNGRDSLVNPGPAMATHKDDEDKFFPMSGVLIFGKQGAGNSNVDLDNVMITSEEEIKTTNPVATEEYGTVATNLQSSNTAPATGTVNSQGALPGMVWQNRDVYLQGPIWAKIPHTDGHFHPSPLMGGFGLKHPPPQILIKNTPVPANPPTTFSPAKFASFITQYSTGQVSVEIEWELQKENSKRWNPEIQYTSNYNKSTNVDFAVDTNGVYSEPRPIGTRYLTRNL

SEQ ID NO: 1479 - protein, 736 aa, Artificial Sequence
  Description of Artificial Sequence: Synthetic polypeptide
MAADGYLPDWLEDNLSEGIREWWDLKPGAPKPKANQQKQDDGRGLVLPGYKYLGPFNGLDKGEPVNAADAAALEHDKAYDQQLKAGDNPYLRYNHADAEFQERLQEDTSFGGNLGRAVFQAKKRVLEPLGLVEEGAKTAPGKKRPVEQSPQEPDSSSGIGKKGQQPAKKRLNFGQTGDSESVPDPQPLGEPPAAPSGVGSNTMASGGGAPMADNNEGADGVGNASGNWHCDSTWLGDRVITTSTRTWALPTYNNHLYKQISSQSGGSTNDNTYFGYSTPWGYFDFNRFHCHFSPRDWQRLINNNWGFRPKKLNFKLFNIQVKEVTTNDGTTTIANNLTSTVQVFTDSEYQLPYVLGSAHQGCLPPFPADVFMIPQYGYLTLNNGSQAVGRSSFYCLEYFPSQMLRTGNNFQFSYTFEDVPFHSSYAHSQSLDRLMNPLIDQYLYYLSRTQTTSGTAGNRELQFSQAGPSSMANQAKNWLPGPCYRQQRVSKTTNQNNNSNFAWTGATKYHLNGRDSLVNPGPAMATHKDDEDKFFPMSGVLIFGKQGAGNSNVDLDNVMITNEEEIKTTNPVATEQYGTVATNLQSANTAPATGTVNSQGALPGMVWQDRDVYLQGPIWAKIPHTDGHFHPSPLMGGFGLKHPPPQILIKNTPVPANPPTTFSPAKFASFITQYSTGQVSVEIEWELQKENSKRWNPEIQYTSNYNKSTNVDFAVDTNGVYSEPRPIGTRYLTRNL

SEQ ID NO: 1480 - DNA, 2211 bp, Artificial Sequence
  Description of Artificial Sequence: Synthetic polynucleotide
atggctgccgatggttatcttccagattggctcgaggacaacctctctgagggcattcgcgagtggtgggacttgaaacctggagccccgaaacccaaagccaaccagcaaaagcaggacgacggccggggtctggtgcttcctggctacaagtacctcggacccttcaacggactcgacaagggggagcccgtcaacgcggcggacgcagcggccctcgagcacgacaaggcctacgaccagcagctcaaagcgggtgacaatccgtacctgcggtataaccacgccgacgccgagtttcaggagcgtctgcaagaagatacgtcttttgggggcaacctcgggcgagcagtcttccaggccaagaagcgggttctcgaacctctcggtctggttgaggaaggcgctaagacggctcctggaaagaagagaccggtagagcaatcaccccaggaaccagactcctcttcgggcatcggcaagaaaggccagcagcccgcgaaaaagagactcaactttgggcagacaggcgactcagagtcagtgcccgaccctcaaccactcggagaaccccccgcagccccctctggtgtgggatctaatacaatggctgcaggcggtggcgctccaatggcagacaataacgaaggcgccgacggagtgggtaacgcctcaggaaattggcattgcgattccacatggctgggcgacagagtcatcaccaccagcacccgaacctgggccctccccacctacaacaaccacctctacaagcaaatctccagccaatcgggagcaagcaccaacgacaacacctacttcggctacagcaccccctgggggtattttgactttaacagattccactgccacttctcaccacgtgactggcagcgactcatcaacaacaactggggattccggcccaagagactcaacttcaagctcttcaacatccaggtcaaggaggtcacgacgaatgatggcaccacgaccatcgccaataaccttaccagcacggttcaggtctttacggactcggaataccagctcccgtacgtcctcggctctgcgcaccagggctgcctgcctccgttcccggcggacgtcttcatgattcctcagtacgggtacctgactctgaacaatggcagtcaggccgtgggccgttcctccttctactgcctggagtactttccttctcaaatgctgagaacgggcaacaactttgagttcagctacacgtttgaggacgtgccttttcacagcagctacgcgcacagccaaagcctggaccggctgatgaaccccctcatcgaccagtacctgtactacctgtctcggactcagaccacgagtggtaccgcaggaaatcggacgttgcaattttctcaggccgggcctagtagcatggcgaatcaggccaaaaactggctacccgggccctgctaccggcagcaacgcgtctccaagacagcgaatcaaaataacaacagcaactttgcctggaccggtgccaccaagtatcatctgaatggcagagactctctggtaaatcccggtcccgctatggcaacccacaaggacgacgaagacaaattttttccgatgagcggagtcttaatatttgggaaacagggagctggaaatagcaacgtggaccttgacaacgttatgataaccagtgaggaagaaattaaaaccaccaacccagtggccacagaacagtacggcacggtggccactaacctgcaatcgtcaaacaccgctcctgctacagggaccgtcaacagtcaaggagccttacctggcatggtctggcagaaccgggacgtgtacctgcagggtcctatctgggccaagattcctcacacggacggacactttcatccctcgccgctgatgggaggctttggactgaaacacccgcctcctcagatcctgattaagaatacacctgttcccgcgaatcctccaactaccttcagtccagctaagtttgcgtcgttcatcacgcagtacagcaccggacaggtcagcgtggaaattgaatgggagctgcagaaagaaaacagcaaacgctggaacccagagattcaatacacttccaactacaacaaatctacaaatgtggactttgctgttgacacaaatggcgtttattctgagcctcgccccatcggcacccgttacctcacccgtaatctgtaa

SEQ ID NO: 1481 - protein, 738 aa, Artificial Sequence; identical to SEQ ID NO: 7
  Description of Artificial Sequence: Synthetic polypeptide

SEQ ID NO: 1482 - DNA, 2211 bp, Artificial Sequence
  Description of Artificial Sequence: Synthetic polynucleotide
atggctgccgatggttatcttccagattggctcgaggacaacctctctgagggcattcgcgagtggtgggacttgaaacctggagccccgaaacccaaagccaaccagcaaaagcaggacgacggccggggtctggtgcttcctggctacaagtacctcggacccttcaacggactcgacaagggggagcccgtcaacgcggcggacgcagcggccctcgagcacgacaaggcctacgaccagcagctcaaagcgggtgacaatccgtacctgcggtataaccacgccgacgccgagtttcaggagcgtctgcaagaagatacgtcttttgggggcaacctcgggcgagcagtcttccaggccaagaagcgggttctcgaaccttttggtctggttgaggaaggcgctaagacggctcctggaaagaaacgtccggtagagcagtcgccacaagagccagactcctcctcgggcatcggcaagacaggccagcagcccgctaaaaagagactcaattttggtcagactggcgactcagagtcagtccccgacccacaacctctcggagaacctccagcaacccccgctgctgtgggacctactacaatggcttcaggcggtggcgcaccaatggcagacaataacgaaggcgccgacggagtgggtaatgcctcaggaaattggcattgcgattccacatggctgggcgacagagtcatcaccaccagcacccgcacctgggccttgcccacctacaataaccacctctacaagcaaatctccagtgcttcaacgggggccagcaacgacaaccactacttcggctacagcaccccctgggggtattttgatttcaacagattccactgccacttttcaccgcgtgactggcagcgactcatcaacaacaattggggattccggcccaagagactcaacttcaagctcttcaacatccaagtcaaggaggtcacgacgagtgatggcgtcacaaccatcgctaataaccttaccagcacggttcaagtcttctcggactcggagtaccagcttccgtacgtcctcggctctgcgcaccagggctgcctccctccgttcccggcggacgtgttcatgattccgcaatacggctacctgacgctcaacaatggcagccaagccgtgggacgttcatccttttactgcctggaatatttcccttctcagatgctgagaacgggcaacaactttaccttcagctacacctttgaggaagtgcctttccacagcagctacgcgcacagccagagcctggaccggctgatgaatcctctcatcgaccaatacctgtattacctgaacagaactcaaaatcagtccggaagtgcccaaaacaaggacttgctgtttagccgtgggtctccagctggcatgtctgttcagcccaaaaactggctacctggaccctgttatcggcagcagcgcgtttctaaaacaaaaacaggcaacaacaacagcaattttacctggactggtgcttcaaaatataacctcaatgggcatgaatccatcatcaaccctggcactgctatggcctcacacaaagacgacgaagacaagttctttcccatgagcggtgtcatgatttttggaaaagagagcgccggagcttcaaacactgcattggacaatgtcatgattacagacgaagaggaaattaaagccactaaccctgtggccaccgaaagatttgggaccgtggcagtcaatttccagagcagcagcacacaccctgcgaccggagatgtgcatgttatgggagcattacctggcatggtgtggcaagatagagacgtgtacctgcagggtcccatctgggccaaaattcctcacacagatggacactttcacccgtctcctcttatgggcggctttggactcaagcacccgcctcctcagatcctcatcaaaaacacgcctgttcctgcgaatcctccggcggagttttcagctacaaagtttgcttcattcatcacccaatactccacaggacaagtgagtgtggaaattgaatgggagctgcagaaagaaaacagcaagcgctggaatcccgaagtgcagtacacatccaattatgcaaaatctgccaacgttgattttaccgtggacaacaatggactttatactgagcctcgccccattggcacccgttaccttacccgtcccctgtaa

SEQ ID NO: 1483 - DNA, 2211 bp, Artificial Sequence; identical to SEQ ID NO: 1482
  Description of Artificial Sequence: Synthetic polynucleotide

SEQ ID NO: 1484 - DNA, 2202 bp, Artificial Sequence
  Description of Artificial Sequence: Synthetic polynucleotide
atgactgacggttaccttccagattggctagaggacaacctctctgaaggcgttcgagagtggtgggcgctgcaacctggagcccctaaacccaaggcaaatcaacaacatcaggacaacgctcggggtcttgtgcttccgggttacaaatacctcggacccggcaacggacttgacaagggggaacccgtcaacgcagcggacgcggcagccctcgaacacgacaaggcctacgaccagcagctcaaggccggtgacaacccctacctcaagtacaaccacgccgacgccgagtttcaggagcgtcttcaagaagatacgtcttttgggggcaacctcggacgagcagtcttccaggccaaaaagaggatccttgagcctctgggtctggttgaggaagcggctaagacggctcctggaaaaaagagacctgtagagcaatctccagcagaaccggactcctcttcgggcatcggcaaatcaggccagcagcccgctagaaaaagactgaattttggtcagactggcgacacagagtcagtcccagaccctcaaccactcggacaacctcccgcagccccctctggtgtgggatctactacaatggcttcaggcggtggcgcaccaatggcagacaataacgagggtgccgatggagtgggtaattcctcaggaaattggcattgcgattcccaatggctgggcgacagagtcatcaccaccagcacccgcacctgggccctgcccacctacaacaatcacctctacaagcaaatctccagccaatcaggagccaccaacgacaaccactactttggctacagcaccccctgggggtattttgacttcaacagattccactgccacttttcaccacgtgactggcaaagactcatcaacaacaactggggattccgacccaagagactcaacttcaagctctttaacattcaagtcaaagaggtcacgcagaatgacggtacgacgacgattgccaataaccttaccagcacggttcaggtgtttactgactccgagtaccagctcccgtacgtcctcggctcggcgcatcagggatgcctcccgccgttcccagcagacgtcttcatggtcccacagtatggatacctcaccctgaacaacgggagtcaggcggtaggacgctcttccttttactgcctggagtactttccttctcagatgctgcgtactggaaacaactttcagtttagctacacttttgaagacgtgcctttccacagcagctacgctcacagccaaagtctggaccgtctcatgaatcctctgatcgaccagtacctgtactatctgaacaggacacaaacagccagtggaactcagcagtctcggctactgtttagccaagctggacccaccagtatgtctcttcaagctaaaaactggctgcctggaccttgctacagacagcagcgtctgtcaaagcaggcaaacgacaacaacaacagcaactttccctggactggtgccaccaaatatcatctgaatggccgggactcattggtgaacccgggccctgctatggccagtcacaaggatgacaaagaaaagtttttccccatgcatggaaccctgatatttggtaaagaaggaacaaatgccaacaacgcggatttggaaaatgtcatgattacagatgaagaagaaatccgcaccaccaatcccgtggctacggagcagtacgggactgtgtcaaataatttgcaaaactcaaacgctggtccaactactggaactgtcaatcaccaaggagcgttacctggtatggtgtggcaggatcgagacgtgtacctgcagggacccatttgggccaagattcctcacaccgatggacactttcatccttctccactgatgggaggttttgggctcaaacacccgcctcctcagatcatgatcaaaaacactcccgttccagccaatcctcccacaaactttagtgcggcaaagtttgcttccttcatcacacagtactccacggggcaggtcagcgtggagatcgagtgggagctgcagaaggagaacagcaaacgctggaatcccgaaattcagtacacttccaactacaacaaatctgttaatgtggactttactgtggacactaatggtgtgtattcagagcctcgccccattggcaccagatacctgactcgtaatctgtaa

SEQ ID NO: 1485 - DNA, 2211 bp, Artificial Sequence
  Description of Artificial Sequence: Synthetic polynucleotide
atggctgccgatggttatcttccagattggctcgaggacaacctctctgagggcattcgcgagtggtgggacttgaaacctggagccccgaaacccaaagccaaccagcaaaagcaggacgacggccggggtctggtgcttcctggctacaagtacctcggacccttcaacggactcgacaagggggagcccgtcaacgcggcggacgcagcggccctcgagcacgacaaggcctacgaccagcagctcaaagcgggtgacaatccgtacctgcggtataaccacgccgacgccgagtttcaggagcgtctgcaagaagatacgtcttttgggggcaacctcgggcgagcagtcttccaggccaagaagcgggttctcgaaccttttggtctggttgaggaaggcgctaagacggctcctggaaagaaacgtccggtagagcagtcgccacaagagccagactcctcctcgggcatcggcaagacaggccagcagcccgctaaaaagagactcaattttggtcagactggcgactcagagtcagtccccgacccacaacctctcggagaacctccagcaacccccgctgctgtgggacctactacaatggcttcaggcggtggcgcaccaatggcagacaataacgaaggcgccgacggagtgggtaatgcctcaggaaattggcattgcgattccacatggctgggcgacagagtcatcaccaccagcacccgcacctgggccttgcccacctacaataaccacctctacaagcaaatctccagtgcttcaacgggggccagcaacgacaaccactacttcggctacagcaccccctgggggtattttgatttcaacagattccactgccacttttcaccacgtgactggcagcgactcatcaacaacaattggggattccggcccaagagactcaacttcaagctcttcaacatccaagtcaaggaggtcacgacgaatgatggcgtcacaaccatcgctaataaccttaccagcacggttcaagtcttctcggactcggagtaccagcttccgtacgtcctcggctctgcgcaccagggctgcctccctccgttcccggcggacgtgttcatgattccgcaatacggctacctgacgctcaacaatggcagccaagccgtgggacgttcatccttttactgcctggaatatttcccttctcagatgctgagaacgggcaacaactttaccttcagctacacctttgaggaagtgcctttccacagcagctacgcgcacagccagagcctggaccggctgatgaatcctctcatcgaccaatacctgtattacctgaacagaactcaaaatcagtccggaagtgcccaaaacaaggacttgctgtttagccgtgggtctccagctggcatgtctgttcagcccaaaaactggctacctggaccctgttatcggcagcagcgcgtttctaaaacaaaaacagacaacaacaacagcaattttacctggactggtgcttcaaaatataacctcaatgggcgtgaatccatcatcaaccctggcactgctatggcctcacacaaagacgacgaagacaagttctttcccatgagcggtgtcatgatttttggaaaagagagcgccggagcttcaaacactgcattggacaatgtcatgattacagacgaagaggaaattaaagccactaaccctgtggccaccgaaagatttgggaccgtggcagtcaatttccagagcagcagcacagaccctgcgaccggagatgtgcatgttatgggagcattacctggcatggtgtggcaagatagagacgtgtacctgcagggtcccatctgggccaaaattcctcacacagatggacactttcacccgtctcctcttatgggcggctttggactcaagcacccgcctcctcagatcctcatcaaaaacacgcctgttcctgcgaatcctccggcggagttttcagctacaaagtttgcttcattcatcacccaatactccacaggacaagtgagtgtggaaattgaatgggagctgcagaaagaaaacagcaagcgctggaatcccgaagtgcagtacacatccaattatgcaaaatctgccaacgttgattttaccgtggacaacaatggactttatactgagcctcgccccattggcacccgttaccttacccgtcccctgtaa

SEQ ID NO: 1486 - DNA, 2211 bp, Artificial Sequence
  Description of Artificial Sequence: Synthetic polynucleotide
atggctgccgatggttatcttccagattggctcgaggacaacctctctgagggcattcgcaagtggtgggacttgaaacctggagccccgaaacccaaagccaaccagcaaaagcaggacgacggccggggtctggtgcttcctggctacaagtacctcggacccttcaacggactcgacaagggggagcccgtcaacgcggcggacgcagcggccctcgagcacgacaaggcctacgaccagcagctcaaagcgggtgacaatccgtacctgcggtataaccacgccgacgccgagtttcaggagcgtctgcaagaagatacgtcttttgggggcaacctcgggagagcagtcttccaggccaagaagcgggttctcgaaccttttggtctggttgaggaaggcgctaagacggctcctggaaagaaacgtccggtagagcagtcgccacaagagccagactcctcctcgggcatcggcaagacaggccagcagcccgctaaaaagagactcaattttggtcagactggcgactcagagtcagtccccgacccacaacctctcggagaacctccagcaacccccgctgctgtgggacctactacaatggcttcaggcggtggcgcaccaatggcagacaataacgaaggcgccgacggagtgggtaatgcctcaggaaattggcattgcgattccacatggctgggcgacagagtcatcaccaccagcacccgcacctgggccttgcccacctacaataaccacctctacaagcaaatctccagtgcttcaacgggggccagcaacgacaaccactacttcggctacagcaccccctgggggtattttgatttcaacagattccactgccacttttcaccacgtgactggcagcgactcatcaacaacaattggggattccggcccaagagactcaacttcaagctcttcaacatccaagtcaaggaggtcacgacgaatgatggcgtcacaaccatcgctaataaccttaccagcacggttcaagtcttctcggactcggagtaccagcttccgtacgtcctcggctctgcgcaccagggctgcctccctccgttcccggcggacgtgttcatgattccgcaatacggctacctgacgctcaacaatggcagccaagccgtgggacgttcatccttttactgcctggaatatttcccttctcagatgctgagaacgggcaacaactttaccttcagctacacctttgaggaagtgcctttccacagcagctacgcgcacagccagagcctggaccggctgatgaatcctctcatcgaccaatacctgtattacctgaacagaactcaaaatcagtccggaagtgcccaaaacaaggacttgctgtttagccgtgggtctccagctggcatgtctgttcagcccaaaaactggctacctggaccctgttatcggcagcagcgcgtttctaaaacaaaaacagacaacaacaacagcaattttacctggactggtgcttcaaaatataacctcaatgggcgtgaatccatcatcaaccctggcactgctatggcctcacacaaagacgacaaagacaagttctttcccatgagcggtgtcatgatttttggaaaagagagcgccggagcttcaaacactgcattggacaatgtcatgattacagacgaagaggaaattaaagccactaaccctgtggccaccgaaagatttgggaccgtggcagtcaatttccagagcagcagcacagaccctgcgaccggagatgtgcatgttatgggagcattacctggcatggtgtggcaagatagagacgtgtacctgcagggtcccatttgggccaaaattcctcacacagatggacactttcacccgtctcctcttatgggcggctttggactcaagcacccgcctcctcagatcctcatcaaaaacacacctgttcctgcgaatcctccggcggagttttcagctacaaagtttgcttcattcatcacccaatactccacaggacaagtgagtgtggaaattgaatgggagctgcagaaagaaaacagcaagcgctggaatcccgaagtgcagtacacatccaattatgcaaaatctgccaacgttgattttaccgtggacaacaatggactttatactgagcctcgccccattggcacccgttaccttacccgtcccctgtaa

SEQ ID NO: 1487 - DNA, 2211 bp, Artificial Sequence
  Description of Artificial Sequence: Synthetic polynucleotide
atggctgccgatggttatcttccagattggctcgaggacaacctctctgagggcattcgcgagtggtgggacttgaaacctggagccccgaaacccaaagccaaccagcaaaagcaggacaacggccggggtctggtgcttcctggctacaagtacctcggacccttcaacggactcgacaagggggagcccgtcaacgcggcggacgcagcggccctcgagcacgacaaggcctacgaccagcagctcaaagcgggtgacaatccgtacctgcggtataaccacgccgacgccgagtttcaggagcgtctgcaagaagatacgtcttttgggggcaacctcgggcgagcagtcttccaggccaagaagcgggttctcgaaccttttggtctggttgaggaaggcgctaagacggctcctggaaagaaacgtccggtagagcagtcgccacaagagccagactcctcctcgggcatcggcaagacaggccagcagcccgctaaaaagagactcaattttggtcagactggcgactcagagtcagtccccgacccacaacctctcggagaacctccagcaacccccgctgctgtgggacctactacaatggcttcaggcggtggcgcaccaatggcagacaataacgaaggcgccgacggagtgggtaatgcctcaggaaattggcattgcgattccacatggctgggcgacagagtcatcaccaccagcacccgcacctgggccttgcccacctacaataaccacctctacaagcaaatctccagtgcttcaacgggggccagcaacgacaaccactacttcggctacagcaccccctgggggtattttgatttcaacagattccactgccacttttcaccacgtgactggcagcgactcatcaacaacaattggggattccggcccaagagactcaacttcaagctcttcaacatccaagtcaaggaggtcacgacgaatgatggcgtcacaaccatcgctaataaccttaccagcacggttcaagtcttctcggactcggagtaccagcttccgtacgtcctcggctctgcgcaccagggctgcctccctccgttcccggcggacgtgttcatgattccgcaatacggctacctgacgctcaacaatggcagccaagccgtgggacgttcatccttttactgcctggaatatttcccttctcagatgctgagaacgggcaacaactttaccttcagctacacctttgaggaagtgcctttccacagcagctacgcgcacagccagagcctggaccggctgatgaatcctctcatcgaccaatacctgtattacctgaacagaactcaaaatcagtccggaagtgcccaaaacaaggacttgctgtttagccgtgggtctccagctggcatgtctgttcagcccaaaaactggctacctggaccctgttatcggcagcagcgcgtttctaaaacaaaaacagacaacaacaacagcaattttacctggactggtgcttcaaaatataacctcaatgggcgtgaatccatcatcaaccctggcactgctatggcctcacacaaagacgacgaagacaagttctttcccatgagcggtgtcatgatttttggaaaagagagcgccggagcttcaaacactgcattggacaatgtcatgattacagacgaagaggaaattaaagccactaaccctgtggccaccgaaagatttgggaccgtggcagtcaatttccagagcagcagcacacaccctgcgaccggagatgtgcatgttatgggagcattacctggcatggtgtggcaagatagagacgtgtacctgcagggtcccatctgggccaaaattcctcacacagatggacactttcacccgtctcctcttatgggcggctttggactcaagcacccgcctcctcagatcctcatcaaaaacacgcctgttcctgcgaatcctccggcggagttttcagctacaaagtttgcttcattcatcacccaatactccacaggacaagtgagtgtggaaattgaatgggagctgcagaaagaaaacagcaagcgctggaatcccgaagtgcagtacacatccaattatgcaaaatctgccaacgttgattttaccgtggacaacaatggactttatactgagcctcgccccattggcacccgttaccttacccgtcccctgtaa

SEQ ID NO: 1488 - DNA, 2211 bp, Artificial Sequence
  Description of Artificial Sequence: Synthetic polynucleotide
atggctgccgatggttatcttccagattggctcgaggacaacctctctgagggcattcgcgagtggtgggacttgaaacctggagccccgaaacccaaagccaaccagcaaaagcaggacgacggccggggtctggtgcttcctggctacaagtacctcggacccttcaacggactcgacaagggggagcccgtcaacgcggcggacgcagcggccctcgagcacgacaaggcctacgaccagcagctcaaagcgggtgacaatccgtacctgcggtataaccacgccgacgccgagtttcaggagcgtctgcaagaagatacgtcttttgggggcaacctcgggcgagcagtcttccaggccaaaaagcgggttctcgaaccttttggtctggttgaggaaggcgctaagacggctcctggaaagaaacgtccggtagagcagtcgccacaagagccagactcctcctcgggcatcggcaagacaggccagcagcccgctaaaaagagactcaattttggtcagactggcgactcagagtcagtccccgacccacaacctctcggagaacctccagcaacccccgctgctgtgggacctactacaatggcttcaggcggtggcgcaccaatggcagacaataacgaaggcgccgacggagtgggtaatgcctcaggaaattggcattgcgattccacatggctgggcgacagagtcatcaccaccagcacccgcacctgggccttgcccacctacaataaccacctctacaagcaaatctccagtgcttcaacgggggccagcaacgacaaccactacttcggctacagcaccccctgggggtattttgatttcaacagattccactgccacttttcaccacgtgactggcagcgactcatcaacaacaattggggattccggcccaagagactcaacttcaagctcttcaacatccaagtcaaggaggtcacgacgaatgatggcgtcacaaccatcgctaataaccttaccagcacggttcaagtcttctcggactcggagtaccagcttccgtacgtcctcggctctgcgcaccagggctgcctccctccgttcccggcggacgtgttcatgattccgcaatacggctacctgacgctcaacaatggcagccaagccgtgggacgttcatccttttattgcctggaatatttcccatcgcagatgctgagaacgggcaataactttaccttcagctacacctttgaggacgtgcctttccacagcagctacgcgcacagccagagcctggaccggctgatgaatcctctcatcgaccagtacctgtattacctgaacagaactcagaaccagtccggaagtgcccaaaacaaggacttgctgtttagccgggggtctccagctggcatgtctgttcagctcaaaaactggctacctggaccctgttatcggcagcagcgcgtttctaaaacaaaaacagacaacaacaacagcaattttacctggactggtgcttcaaaatataaccttaatgggcgtgaatccatcatcaaccctggcactgctatggcctcacacaaagacgacgaagacaagttctttcccatgagcggtgtcatgatttttggaaaagagagcgccggagcttcaaacactgcattggacaatgtcatgattacagacgaagaggaaattaaagccactaaccctgtggccaccgaaagatttgggaccgtggcagtcaatttccagagcagcagcacagaccctgcgaccggagatgtgcatgttatgggagcattacctggcatggtgtggcaagatagagacgtgtacctgcagggtcccatttgggccaaaattcctcacacagatggacactttcacccgtctcctcttatgggcggctttggactcaaacacccgcctcctcagatcctcatcaaaaacacacctgttcctgcgaatcctccggcggagttttcagctacaaagtttgcttcattcatcacccaatactccacaggacaagtgagcgtggaaattgaatgggagctgcagaaagaaaacagcaagcgctggaatcccgaagtgcagtacacatccaattatgcaaaatctgccaacgttgattttaccgtggacaacaatggactttatactgagcctcgccccattggcacccgttaccttacccgtcccctgtaa

SEQ ID NO: 1489 - DNA, 2211 bp, Artificial Sequence
  Description of Artificial Sequence: Synthetic polynucleotide
atggctgccgatggttatcttccagattggctcgaggacaacctctctgagggcattcgcgagtggtgggacttgaaacctggagccccgaaacccaaagccaaccagcaaaagcaggacgacggccggggtctggtgcttcctggctacaagtacctcggacccttcaacggactcgacaagggggagcccgtcaacgcggcggacgcagcggccctcgagcacgacaaggcctacgaccagcagctcaaagcgggtgacaatccgtacctgcggtataaccacgccgacgccgagtttcaggagcgtctgcaagaagatacgtcttttgggggcaacctcgggcgagcagtcttccaggccaagaagcgggttctcgaaccttttggtctggttgaggaaggtgctaagacggctcctggaaagaagagaccggtagagcagtcgccccaagaaccagactcctcatcgggcatcggcaaatcaggccagcagcccgctaaaaagagactcaattttggtcagactggcgactcagagtcagtccccgacccacaacctctcggagaacctccagcaacccccgctgctgtgggacctactacaatggcttcaggcggtggcgcaccaatggcagacaataacgaaggcgccgacggagtgggtaatgcctcaggaaattggcattgcgattccacatggctgggcgacagagtcattaccaccagcacccgaacctgggccctgcccacctataacaaccacctctacaaacaaatctccagcgcttcaacgggggccagcaacgacaaccactacttcggctacagcaccccctgggggtattttgattttaacagattccactgccacttctcaccacgtgactggcagcgactcatcaacaacaattggggattccggcccaagagactcaacttcaagctcttcaacatccaagtcaaggaggtcacgacgaacgatggcgtcacgaccatcgctaataaccttaccagcacggttcaagtcttctcggactcggagtaccagttgccgtacgtcctcggctctgcgcaccagggctgcctccctccgttcccggcggacgtgttcatgattccgcagtacggctacctaacactcaacaatggcagccaggccgtgggacgttcatccttttactgcctggaatatttcccatcgcagatgctgagaacgggcaataactttaccttcagctacacattcgaggacgtgcctttccacagcagctacgcgcacagccaaagcctggaccggctgatgaatcctctcatcgaccagtacttgtattacctaaacagaactcaaaatcagtccggaagtgcccaaaacaaggacttgctgtttagccgggggtctccagctggcatgtctgttcagcccaaaaactggctacctggaccctgttatcggcagcagcgcgtttctaaaacaaaaacagacaacaacaacagcaactttacctggactggtgcttcaaaatataaccttaatgggcgtgaatctataatcaaccctggcactgctatggcttcacacaaagacgacgaagacaagttctttccaatgagcggtgtcatgatttttggcaaggagagcgccggagcttcaaacactgcattggacaatgtcatgattacagacgaagaggaaattaaagccactaaccctgtggccaccgaaagatttgggaccgtggcagtcaatttccagagcagcagcacagaccctgcgaccggagatgtgcatgttatgggagcattacctggcatggtgtggcaagatagagacgtgtacctgcagggtccaatttgggccaaaattcctcacacagatggacactttcacccgtctcctcttatgggcggctttggacttaagcacccgcctcctcagatcctcatcaaaaacacgcctgttcctgcgaatcctccggcagagttttcggctacaaagtttgcttcattcatcacccagtattccacaggacaagtgagtgtggaaattgaatgggagttgcagaaagaaaacagcaagcgttggaatcccgaagtgcagtacacatctaattatgcaaaatctgccaacgttgatttcactgtggacaacaatggactttatactgagcctcgccccattggcacccgttacctcacccgtcccctgtaa

SEQ ID NO: 1490 - DNA, 2211 bp, Artificial Sequence
  Description of Artificial Sequence: Synthetic polynucleotide
atggctgccgatggttatcttccagattggctcgaggacaacctctctgagggcattcgcgagtggtgggacttgaaacctggagccccgaaacccaaagccaaccagcaaaagcaggacgacggccggggtctggtgcttcctggctacaagtacctcggacccttcaacggactcgacaagggggagcccgtcaacgcggcggacgcagcggccctcgagcacgacaaggcctacgaccagcagctcaaagcgggtgacaatccgtacctgcggtataaccacgccgacgccgagtttcaggagcgtctgcaagaagatacgtcttttgggggcaacctcgggcgagcagtcttccaggccaagaagagggttctcgaaccttttggtctggttgaggaaggtgctaagacggctcctggaaagaaacgtccggtagagcagtcaccccaagaaccagactcctcctcgggcattggcaaatcaggccagcagcccgctaaaaagagactcaattttggtcagactggcgactcagagtcagtccccgacccacaacctctcggagaacctccagcaacccccgctgctttgggacctactacaatggcttcaggcggtggcgcaccaatggcagacaataacgaaggcgccgacggagtgggtaatgcctcaggaaattggcattgcgattccacatggctgggcgacagagtcatcaccaccagcacccgcacctgggccttgcccacctacaataaccacctctacaagcaaatctccagtgcttcaacgggggccagcaacgacaaccactacttcggctacagcaccccctgggggtattttgatttcaacagattccactgccatttctcaccacgtgactggcagcgactcatcaacaacaactggggattccggcccaagagactcaacttcaagctcttcaacatccaagtcaaggaggtcacgacgaacgatggcgtcacgaccatcgctaataaccttaccagcacggttcaagtcttctcggactcggagtaccagcttccgtacgtcctcggctctgcgcaccagggctgcctccctccgttcccggcggacgtgttcatgattccgcagtacggctacctgacgctcaacaatggcagcaaagccgtgggacgttcatccttttactgcctggaatatttcccttctcagatgctgagaacgggcaacaactttaccttcagctacacctttgaggaagtgcctttccacagcagctacgcgcacagccagagcctggaccggctgatgaatcctctcatcgaccaatacctgtattacctgaacagaactcaaaatcagtccggaagtgcccaaaacaaggacttgctgtttagccgtgggtctccagctggcatgtctgttcagcccaaaaactggctacctggaccctgttatcggcagcagcgcgtttctaaaacaaaaacagacaacaacaacagcaattttacctggactggtgcttcaaaatataacctcaatgggcgtgaatccatcatcaaccctggcactgctatggcctcacacaaagacgacgaagacaagttctttcccatgagcggtgtcatgatttttggaaaagagagcgccggagcttcaaacactgcattggacaatgtcatgattacagacgaagaggaaattaaagccactaaccctgtggccaccgaaagatttgggaccgtggcagtcaatttccagagcagcagcacagaccctgcgaccggagatgtgcatgttatgggagcattacctggcatggtgtggcaagatagagacgtgtacctgcagggtcccatttgggccaaaattcctcacacggatggacactttcacccgtctcctcttatgggcggctttggactcaagcacccgcctcctcagatcctcatcaaaaacacacctgttcctgcgaatcctccggcagagttttcggctacaaagtttgcttcattcatcacccagtactccacaggacaagtgagcgtggaaattgaatgggagttgcagaaagaaaacagtaagcgctggaatcccgaagtgcagtacacatctaattatgcaaaatctgccaacgttgacttcactgtggacaacaatggactttatactgagcctcgccccattggcacccgttacctcacccgtcccctgtaa

SEQ ID NO: 1491 - DNA, 2970 bp, Artificial Sequence
  Description of Artificial Sequence: Synthetic polynucleotide
agatgaccgccaaggtcgtagagtccgccaaggccattctgggcggcagcaaggtgcgcgtggaccaaaaatgcaaggcctctgcgcagatcgaccccacccccgtgatcgtcacctccaacaccaacatgtgcgccgtgattgacgggaacagcaccaccttcgagcaccagcagcccctgcaggaccggatgttcaagtttgaactcacccgccgcctcgactacgactttggcaaggtcaccaagcaggaagtcaaggactttttccggtgggcggctgatcacgtgactgacgtggctcatgagttttacgtcacaaagggtggagctaagaaaaggcccgccccctctgacgaggatataagcgagcccaagcggccgcgcgtgtcatttgcgcagccggagacgtcagacgcggaagctcccggagacttcgccgacaggtaccaaaacaaatgttctcgtcacgcgggtatgctgcagatgctctttccctgcaagacgtgcgagagaatgaatcagaattccaacgtctgcttcacgcacggtcagaaagattgcggggagtgctttcccgggtcagaatctcaaccggtttctgtcgtcagaaaaacgtatcagaaactgtgcatccttcatcagctccggggggcacccgagatcgcctgctctgcttgcgaccaactcaaccccgatttggacgattgccaatttgagcaataaatgactgaaatcaggtatggctgctgacggttatcttccagattggctcgaggacaacctctctgaaggcattcgcgagtggtgggcgctgaaacctggagctccacaacccaaggccaaccaacagcatcaggacaacggcaggggtcttgtgcttcctgggtacaagtacctcggacccttcaacggactcgacaagggagagccggtcaacgaggcagacgccgcggccctcgagcacgacaaggcctacgacaagcagctcgagcagggggacaacccgtatctcaagtacaaccacggcgacgccgagttccagcagcgcttggcgaccgacacctcttttgggggcaacctcgggcgagcagtcttccaggccaaaaagaggattctcgagcctctgggtctggttgaagagggcgttaaaacggctcctggaaagaaacgcccattagaaaagactccaaatcggccgaccaacccggactctgggaaggccccggccaagaaaaagcaaaaagacggcgaaccagccgactctgctagaaggacactcgactttgaagactctggagcaggagacggaccccctgagggatcatcttccggagaaatgtctcatgatgctgagatgcgtgcggcgccaggcggaaatgctgtcgaggcgggacaaggtgccgatggagtgggtaatgcctccggtgattggcattgcgattccacctggtcagagggccgagtcaccaccaccagcacccgaacctgggtcctacccacgtacaacaaccacctgtacctgcgaatcggaacaacggccaacagcaacacctacaacggattctccaccccctggggatactttgactttaaccgcttccactgccacttttccccacgcgactggcagcgactcatcaacaacaactggggactcaggccgaaatcgatgcgtgttaaaatcttcaacatacaggtcaaggaggtcacgacgtcaaacggcgagactacggtcgctaataaccttaccagcacggttcagatctttgcggattcgacgtatgaactcccatacgtgatggacgccggtcaggaggggagctttcctccgtttcccaacgacgtctttatggttccccaatacggatactgcggagttgtcactggaaaaaaccagaaccagacagacagaaatgccttttactgcctggaatactttccatcccaaatgctaagaactggcaacaattttgaagtcagttaccaatttgaaaaagttcctttccattcaatgtacgcgcacagccagagcctggacagaatgatgaatcctttactggatcagtacctgtggcatctgcaatcgaccactaccggaaattcccttaatcaaggaacagctaccaccacgtacgggaaaattaccactggagactttgcctactacaggaaaaactggttgcctggagcctgcattaaacaacaaaaattttcaaagaatgccaatcaaaactacaagattcccgccagcgggggagacgcccttttaaagtatgacacgcataccactctaaatgggcgatggagtaacatggctcctggacctccaatggcaaccgcaggtgccggggactcggattttagcaacagccagctgatctttgccggacccaatccgagcggtaacacgaccacatcttcaaacaatttgttgtttacctcagaagaggagattgccacaacaaacccacgagacacggacatgtttggacagattgcagataataatcaaaatgccaccaccgcccctcacatcgctaacctggacgctatgggaattgttcccggaatggtctggcaaaacagagacatctactaccagggccctatttgggccaaggtccctcacacggacggacactttcacccttcgccgctgatgggaggatttggactgaaacacccgcctccacagattttcatcaaaaacacccccgtacccgccaatcccaatactacctttagcgctgcaaggattaattcttttctgacgcagtacagcaccggacaagttgccgttcagatcgactgggaaattcagaaggagcattccaaacgctggaatcccgaagttcaatttacttcaaactacggcactcaaaattctatgctgtgggctcccgacaatgctggcaactaccacgaactccgggctattgggtcccgtttcctcacccaccacttgtaa

SEQ ID NO: 1492 - protein, 736 aa, Artificial Sequence
  Description of Artificial Sequence: Synthetic polypeptide
MAADGYLPDWLEDNLSEGIREWWDLKPGAPKPKANQQKQDDGRGLVLPGYKYLGPFNGLDKGEPVNAADAAALEHDKAYDQQLKAGDNPYLRYNHADAEFQERLQEDTSFGGNLGRAVFQAKKRVLEPFGLVEEGAKTAPGKKRPVEQSPQEPDSSSGIGKTGQQPAKKRLNFGQTGDSESVPDPQPLGEPPATPAAVGPTTMASGGGAPMADNNEGADGVGNASGNWHCDSTWLGDRVITTSTRTWALPTYNNHLYKQISSASTGASNDNHYFGYSTPWGYFDFNRFHCHFSPRDWQRLINNNWGFRPKRLNFKLFNIQVKEVTTSDGVTTIANNLTSTVQVFSDSEYQLPYVLGSAHQGCLPPFPADVFMIPQYGYLTLNNGSQAVGRSSFYCLEYFPSQMLRTGNNFTFSYTFEEVPFHSSYAHSQSLDRLMNPLIDQYLYYLNRTQNQSGSAQNKDLLFSRGSPAGMSVQPKNWLPGPCYRQQRVSKTKTGNNNSNFTWTGASKYNLNGHESIINPGTAMASHKDDEDKFFPMSGVMIFGKESAGASNTALDNVMITDEEEIKATNPVATERFGTVAVNFQSSSTHPATGDVHVMGALPGMVWQDRDVYLQGPIWAKIPHTDGHFHPSPLMGGFGLKHPPPQILIKNTPVPANPPAEFSATKFASFITQYSTGQVSVEIEWELQKENSKRWNPEVQYTSNYAKSANVDFTVDNNGLYTEPRPIGTRYLTRPL

SEQ ID NO: 1493 - protein, 736 aa, Artificial Sequence; identical to SEQ ID NO: 1492
  Description of Artificial Sequence: Synthetic polypeptide

SEQ ID NO: 1494 - protein, 733 aa, Artificial Sequence
  Description of Artificial Sequence: Synthetic polypeptide
MTDGYLPDWLEDNLSEGVREWWALQPGAPKPKANQQHQDNARGLVLPGYKYLGPGNGLDKGEPVNAADAAALEHDKAYDQQLKAGDNPYLKYNHADAEFQERLQEDTSFGGNLGRAVFQAKKRILEPLGLVEEAAKTAPGKKRPVEQSPAEPDSSSGIGKSGQQPARKRLNFGQTGDTESVPDPQPLGQPPAAPSGVGSTTMASGGGAPMADNNEGADGVGNSSGNWHCDSQWLGDRVITTSTRTWALPTYNNHLYKQISSQSGATNDNHYFGYSTPWGYFDFNRFHCHFSPRDWQRLINNNWGFRPKRLNFKLFNIQVKEVTQNDGTTTIANNLTSTVQVFTDSEYQLPYVLGSAHQGCLPPFPADVFMVPQYGYLTLNNGSQAVGRSSFYCLEYFPSQMLRTGNNFQFSYTFEDVPFHSSYAHSQSLDRLMNPLIDQYLYYLNRTQTASGTQQSRLLFSQAGPTSMSLQAKNWLPGPCYRQQRLSKQANDNNNSNFPWTGATKYHLNGRDSLVNPGPAMASHKDDKEKFFPMHGTLIFGKEGTNANNADLENVMITDEEEIRTTNPVATEQYGTVSNNLQNSNAGPTTGTVNHQGALPGMVWQDRDVYLQGPIWAKIPHTDGHFHPSPLMGGFGLKHPPPQIMIKNTPVPANPPTNFSAAKFASFITQYSTGQVSVEIEWELQKENSKRWNPEIQYTSNYNKSVNVDFTVDTNGVYSEPRPIGTRYLTRNL

SEQ ID NO: 1495 - protein, 736 aa, Artificial Sequence; identical to SEQ ID NO: 757
  Description of Artificial Sequence: Synthetic polypeptide

SEQ ID NO: 1496 - protein, 736 aa, Artificial Sequence
  Description of Artificial Sequence: Synthetic polypeptide
MAADGYLPDWLEDNLSEGIRKWWDLKPGAPKPKANQQKQDDGRGLVLPGYKYLGPFNGLDKGEPVNAADAAALEHDKAYDQQLKAGDNPYLRYNHADAEFQERLQEDTSFGGNLGRAVFQAKKRVLEPFGLVEEGAKTAPGKKRPVEQSPQEPDSSSGIGKTGQQPAKKRLNFGQTGDSESVPDPQPLGEPPATPAAVGPTTMASGGGAPMADNNEGADGVGNASGNWHCDSTWLGDRVITTSTRTWALPTYNNHLYKQISSASTGASNDNHYFGYSTPWGYFDFNRFHCHFSPRDWQRLINNNWGFRPKRLNFKLFNIQVKEVTTNDGVTTIANNLTSTVQVFSDSEYQLPYVLGSAHQGCLPPFPADVFMIPQYGYLTLNNGSQAVGRSSFYCLEYFPSQMLRTGNNFTFSYTFEEVPFHSSYAHSQSLDRLMNPLIDQYLYYLNRTQNQSGSAQNKDLLFSRGSPAGMSVQPKNWLPGPCYRQQRVSKTKTDNNNSNFTWTGASKYNLNGRESIINPGTAMASHKDDKDKFFPMSGVMIFGKESAGASNTALDNVMITDEEEIKATNPVATERFGTVAVNFQSSSTDPATGDVHVMGALPGMVWQDRDVYLQGPIWAKIPHTDGHFHPSPLMGGFGLKHPPPQILIKNTPVPANPPAEFSATKFASFITQYSTGQVSVEIEWELQKENSKRWNPEVQYTSNYAKSANVDFTVDNNGLYTEPRPIGTRYLTRPL

SEQ ID NO: 1497 - protein, 736 aa, Artificial Sequence
  Description of Artificial Sequence: Synthetic polypeptide
MAADGYLPDWLEDNLSEGIREWWDLKPGAPKPKANQQKQDNGRGLVLPGYKYLGPFNGLDKGEPVNAADAAALEHDKAYDQQLKAGDNPYLRYNHADAEFQERLQEDTSFGGNLGRAVFQAKKRVLEPFGLVEEGAKTAPGKKRPVEQSPQEPDSSSGIGKTGQQPAKKRLNFGQTGDSESVPDPQPLGEPPATPAAVGPTTMASGGGAPMADNNEGADGVGNASGNWHCDSTWLGDRVITTSTRTWALPTYNNHLYKQISSASTGASNDNHYFGYSTPWGYFDFNRFHCHFSPRDWQRLINNNWGFRPKRLNFKLFNIQVKEVTTNDGVTTIANNLTSTVQVFSDSEYQLPYVLGSAHQGCLPPFPADVFMIPQYGYLTLNNGSQAVGRSSFYCLEYFPSQMLRTGNNFTFSYTFEEVPFHSSYAHSQSLDRLMNPLIDQYLYYLNRTQNQSGSAQNKDLLFSRGSPAGMSVQPKNWLPGPCYRQQRVSKTKTDNNNSNFTWTGASKYNLNGRESIINPGTAMASHKDDEDKFFPMSGVMIFGKESAGASNTALDNVMITDEEEIKATNPVATERFGTVAVNFQSSSTHPATGDVHVMGALPGMVWQDRDVYLQGPIWAKIPHTDGHFHPSPLMGGFGLKHPPPQILIKNTPVPANPPAEFSATKFASFITQYSTGQVSVEIEWELQKENSKRWNPEVQYTSNYAKSANVDFTVDNNGLYTEPRPIGTRYLTRPL

SEQ ID NO: 1498 - protein, 736 aa, Artificial Sequence
  Description of Artificial Sequence: Synthetic polypeptide
MAADGYLPDWLEDNLSEGIREWWDLKPGAPKPKANQQKQDDGRGLVLPGYKYLGPFNGLDKGEPVNAADAAALEHDKAYDQQLKAGDNPYLRYNHADAEFQERLQEDTSFGGNLGRAVFQAKKRVLEPFGLVEEGAKTAPGKKRPVEQSPQEPDSSSGIGKTGQQPAKKRLNFGQTGDSESVPDPQPLGEPPATPAAVGPTTMASGGGAPMADNNEGADGVGNASGNWHCDSTWLGDRVITTSTRTWALPTYNNHLYKQISSASTGASNDNHYFGYSTPWGYFDFNRFHCHFSPRDWQRLINNNWGFRPKRLNFKLFNIQVKEVTTNDGVTTIANNLTSTVQVFSDSEYQLPYVLGSAHQGCLPPFPADVFMIPQYGYLTLNNGSQAVGRSSFYCLEYFPSQMLRTGNNFTFSYTFEDVPFHSSYAHSQSLDRLMNPLIDQYLYYLNRTQNQSGSAQNKDLLFSRGSPAGMSVQLKNWLPGPCYRQQRVSKTKTDNNNSNFTWTGASKYNLNGRESIINPGTAMASHKDDEDKFFPMSGVMIFGKESAGASNTALDNVMITDEEEIKATNPVATERFGTVAVNFQSSSTDPATGDVHVMGALPGMVWQDRDVYLQGPIWAKIPHTDGHFHPSPLMGGFGLKHPPPQILIKNTPVPANPPAEFSATKFASFITQYSTGQVSVEIEWELQKENSKRWNPEVQYTSNYAKSANVDFTVDNNGLYTEPRPIGTRYLTRPL

SEQ ID NO: 1499 - protein, 736 aa, Artificial Sequence
  Description of Artificial Sequence: Synthetic polypeptide
MAADGYLPDWLEDNLSEGIREWWDLKPGAPKPKANQQKQDDGRGLVLPGYKYLGPFNGLDKGEPVNAADAAALEHDKAYDQQLKAGDNPYLRYNHADAEFQERLQEDTSFGGNLGRAVFQAKKRVLEPFGLVEEGAKTAPGKKRPVEQSPQEPDSSSGIGKSGQQPAKKRLNFGQTGDSESVPDPQPLGEPPATPAAVGPTTMASGGGAPMADNNEGADGVGNASGNWHCDSTWLGDRVITTSTRTWALPTYNNHLYKQISSASTGASNDNHYFGYSTPWGYFDFNRFHCHFSPRDWQRLINNNWGFRPKRLNFKLFNIQVKEVTTNDGVTTIANNLTSTVQVFSDSEYQLPYVLGSAHQGCLPPFPADVFMIPQYGYLTLNNGSQAVGRSSFYCLEYFPSQMLRTGNNFTFSYTFEDVPFHSSYAHSQSLDRLMNPLIDQYLYYLNRTQNQSGSAQNKDLLFSRGSPAGMSVQPKNWLPGPCYRQQRVSKTKTDNNNSNFTWTGASKYNLNGRESIINPGTAMASHKDDEDKFFPMSGVMIFGKGSAGASNTALDNVMITDEEEIKATNPVATERFGTVAVNFQSSSTDPATGDVHVMGALPGMVWQDRDVYLQGPIWAKIPHTDGHFHPSPLMGGFGLKHPPPQILIKNTPVPANPPAEFSATKFASFITQYSTGQVSVEIEWELQKENSKRWNPEVQYTSNYAKSANVDFTVDNNGLYTEPRPIGTRYLTRPL

SEQ ID NO: 1500 - protein, 736 aa, Artificial Sequence; identical to SEQ ID NO: 688
  Description of Artificial Sequence: Synthetic polypeptide

SEQ ID NO: 1501 - protein, 742 aa, Artificial Sequence
  Description of Artificial Sequence: Synthetic polypeptide
MAADGYLPDWLEDNLSEGIREWWALKPGAPQPKANQQHQDNGRGLVLPGYKYLGPFNGLDKGEPVNEADAAALEHDKAYDKQLEQGDNPYLKYNHADAEFQQRLATDTSFGGNLGRAVFQAKKRILEPLGLVEEGVKTAPGKKRPLEKTPNRPTNPDSGKAPAKKKQKDGEPADSARRTLDFEDSGAGDGPPEGSSSGEMSHDAEMRAAPGGNAVEAGQGADGVGNASGDWHCDSTWSEGRVTTTSTRTWVLPTYNNHLYLRIGTTANSNTYNGFSTPWGYFDFNRFHCHFSPRDWQRLINNNWGLRPKSMRVKIFNIQVKEVTTSNGETTVANNLTSTVQIFADSTYELPYVMDAGQEGSFPPFPNDVFMVPQYGYCGVVTGKNQNQTDRNAFYCLEYFPSQMLRTGNNFEVSYQFEKVPFHSMYAHSQSLDRMMNPLLDQYLWHLQSTTTGNSLNQGTATTTYGKITTGDFAYYRKNWLPGACIKQQKFSKNANQNYKIPASGGDALLKYDTHTTLNGRWSNMAPGPPMATAGAGDSDFSNSQLIFAGPNPSGNTTTSSNNLLFTSEEEIATTNPRDTDMFGQIADNNQNATTAPHIANLDAMGIVPGMVWQNRDIYYQGPIWAKVPHTDGHFHPSPLMGGFGLKHPPPQIFIKNTPVPANPNTTFSAARINSFLTQYSTGQVAVQIDWEIQKEHSKRWNPEVQFTSNYGTQNSMLWAPDNAGNYHELRAIGSRFLTHHL

SEQ ID NO: 1502 - DNA, 2211 bp, Artificial Sequence
  Description of Artificial Sequence: Synthetic polynucleotide
atggctgccgatggttatcttccagattggctcgaggacaacctctctgagggcattcgcgagtggtgggacttgaaacctggagccccgaagcccaaagccaaccagcaaaagcaggacgacggccggggtctggtgcttcctggctacaagtacctcggacccttcaacggactcgacaagggggagcccgtcaacgcggcggacgcagcggccctcgagcacgacaaggcctacgaccagcagctcaaagcgggtgacaatccgtacctgcggtataaccacgccgacgccgagtttcaggagcgtctgcaagaagatacgtcttttgggggcaacctcgggcgagcagtcttccaggccaagaagcgggttctcgaacctctcggtctggttgaggaaggcgctaaggcggctcctggaaagaaacgtccggtagagcagtcgccacaagagccagactcctcctcgggcatcggcaagacaggccagcagcccgctaaaaagagactcaattttggtcagactggcgactcagagtcagtccccgatccacaacctctcggagaacctccagcagccccctcaggtctgggacctaatacaatggcttcaggcggtggcgctccaatggcagacaataacgaaggcgccgacggagtgggtaattcctcgggaaattggcattgcgattccacatggctgggggacagagtcatcaccaccagcacccgaacctgggccctgcccacctacaacaaccacctctacaagcaaatctccaacggcacctcgggaggaagcaccaacgacaacacctattttggctacagcaccccctgggggtattttgacttcaacagattccactgtcacttttcaccacgtgactggcaacgactcatcaacaacaattggggattccggcccaaaagactcaacttcaagctgttcaacatccaggtcaaggaagtcacgacgaacgaaggcaccaagaccatcgccaataatctcaccagcaccgtgcaggtctttacggactcggagtaccagttaccgtacgtgctaggatccgctcaccagggatgtctgcctccgttcccggcggacgtcttcatggttcctcagtacggctatttaactttaaacaatggaagccaagccctgggacgttcctccttctactgtctggagtatttcccatcgcagatgctgagaaccggcaacaactttcagttcagctacaccttcgaggacgtgcctttccacagcagctacgcgcacagccagagcctggacaggctgatgaatcccctcatcgaccagtacctgtactacctggtcagaacgcaaacgactggaactggagggacgcagactctggcattcagccaagcgggtcctagctcaatggccaaccaggctagaaattgggtgcccggaccttgctaccggcagcagcgcgtctccacgacaaccaaccagaacaacaacagcaactttgcctggacgggagctgccaagtttaagctgaacggccgagactctctaatgaatccgggcgtggcaatggcttcccacaaggatgacgacgaccgcttcttcccttcgagcggggtcctgatttttggcaagcaaggagccgggaacgatggagtggattacagccaagtgctgattacagatgaggaagaaatcaaggctaccaaccccgtggccacagaagaatatggagcagtggccatcaacaaccaggccgccaatacgcaggcgcagaccggactcgtgcacaaccagggggtgattcccggcatggtgtggcagaatagagacgtgtacctgcagggtcccatctgggccaaaattcctcacacggacggcaactttcacccgtctcccctgatgggcggctttggactgaagcacccgcctcctcaaattctcatcaagaacacaccggttccagcggacccgccgcttaccttcaaccaggccaagctgaactctttcatcacgcagtacagcaccggacaggtcagcgtggaaatcgagtgggagctgcagaaagaaaacagcaaacgctggaatccagagattcaatacacttccaactactacaaatctacaaatgtggactttgctgtcaacacggagggggtttatagcgagcctcgccccattggcacccgttacctcacccgcaacctgtaa

SEQ ID NO: 1503 - DNA, 2592 bp, Artificial Sequence
  Description of Artificial Sequence: Synthetic polynucleotide
ctggctgccgatggttatcttccagattggctcgaggacaacctctctgagggcattcgcgagtggtgggacttgaaacctggagccccgaagcccaaagccaaccagcaaaagcaggacgacggccggggtctggtgcttcctggctacaagtacctcggacccttcaacggactcgacaagggggagcccgtcaacgcggcggacgcagcggccctcgagcacgacaaggcctacgaccagcagctcaaagcgggtgacaatccgtacctgcggtataaccacgccgacgccgagtttcaggagcgtctgcaagaagatacgtcttttgggggcaacctcgggcgagcagtcttccaggccaagaagcgggttctcgaacctctcggtctggttgaggaaggcgctaagatggaagtgcagctccaagccagtggtggcggactggtgcaggcaggaggcagcttgaggctcagctgtgccgccagcggcttcaagatcacccactacaccatgggctggttccggcaggcccctggcaaggagagggagttcgtgagcaggattacctggggtggtgacaacaccttctacagcaacagcgtgaagggcaggttcaccatcagcagggacaacgccaagaacaccgtgtacctgcagatgaacagcctgaagcccgaggacaccgccgactactactgtgcagccggcagtaccagcaccgctacccccctgagggtggactactggggcaaaggcactcaggtgacagtgtcttcaggagggggtggcagcgctcctggaaagaaacgtccggtagagcagtcgccacaagagccagactcctcctcgggcatcggcaagacaggccagcagcccgctaaaaagagactcaattttggtcagactggcgactcagagtcagtccccgatccacaacctctcggagaacctccagcagccccctcaggtctgggacctaatacaatggcttcaggcggtggcgctccaatggcagacaataacgaaggcgccgacggagtgggtaattcctcgggaaattggcattgcgattccacatggctgggggacagagtcatcaccaccagcacccgaacctgggccctgcccacctacaacaaccacctctacaagcaaatctccaacggcacctcgggaggaagcaccaacgacaacacctattttggctacagcaccccctgggggtattttgacttcaacagattccactgtcacttttcaccacgtgactggcaacgactcatcaacaacaattggggattccggcccaaaagactcaacttcaagctgttcaacatccaggtcaaggaagtcacgacgaacgaaggcaccaagaccatcgccaataatctcaccagcaccgtgcaggtctttacggactcggagtaccagttaccgtacgtgctaggatccgctcaccagggatgtctgcctccgttcccggcggacgtcttcatggttcctcagtacggctatttaactttaaacaatggaagccaagccctgggacgttcctccttctactgtctggagtatttcccatcgcagatgctgagaaccggcaacaactttcagttcagctacaccttcgaggacgtgcctttccacagcagctacgcgcacagccagagcctggacaggctgatgaatcccctcatcgaccagtacctgtactacctggtcagaacgcaaacgactggaactggagggacgcagactctggcattcagccaagcgggtcctagctcaatggccaaccaggctagaaattgggtgcccggaccttgctaccggcagcagcgcgtctccacgacaaccaaccagaacaacaacagcaactttgcctggacgggagctgccaagtttaagctgaacggccgagactctctaatgaatccgggcgtggcaatggcttcccacaaggatgacgacgaccgcttcttcccttcgagcggggtcctgatttttggcaagcaaggagccgggaacgatggagtggattacagccaagtgctgattacagatgaggaagaaatcaaggctaccaaccccgtggccacagaagaatatggagcagtggccatcaacaaccaggccgccaatacgcaggcgcagaccggactcgtgcacaaccagggggtgattcccggcatggtgtggcagaatagagacgtgtacctgcagggtcccatctgggccaaaattcctcacacggacggcaactttcacccgtctcccctgatgggcggctttggactgaagcacccgcctcctcaaattctcatcaagaacacaccggttccagcggacccgccgcttaccttcaaccaggccaagctgaactctttcatcacgcagtacagcaccggacaggtcagcgtggaaatcgagtgggagctgcagaaagaaaacagcaaacgctggaatccagagattcaatacacttccaactactacaaatctacaaatgtggactttgctgtcaacacggagggggtttatagcgagcctcgccccattggcacccgttacctcacccgcaacctgtaa

SEQ ID NO: 1504 - DNA, 2601 bp, Artificial Sequence
  Description of Artificial Sequence: Synthetic polynucleotide
ctggctgccgatggttatcttccagattggctcgaggacaacctctctgagggcattcgcgagtggtgggacttgaaacctggagccccgaagcccaaagccaaccagcaaaagcaggacgacggccggggtctggtgcttcctggctacaagtacctcggacccttcaacggactcgacaagggggagcccgtcaacgcggcggacgcagcggccctcgagcacgacaaggcctacgaccagcagctcaaagcgggtgacaatccgtacctgcggtataaccacgccgacgccgagtttcaggagcgtctgcaagaagatacgtcttttgggggcaacctcgggcgagcagtcttccaggccaagaagcgggttctcgaacctctcggtctggttgaggaaggcgctaagatggaggtgcagctgcaggcttctggaggaggactggtgcaggctggagggagtctgaggctgtcttgcagtgcctcagtgaggactttctccatctacgccatgggctggtttaggcaggctcccgggaaggagcgcgaattcgtggccggaatcaaccggtctggcgacgtgaccaagtacgctgatttcgtgaaaggccggtttagcatttccagagacaacgccaagaatatggtgtatctgcagatgaactccctgaaacctgaagacacagctctgtactattgtgccgctacttgggcctacgataccgtgggggctctgacatcaggatataatttttggggccaggggacccaggtgacagtgagctccggaggaggaggaagcgctcctggaaagaaacgtccggtagagcagtcgccacaagagccagactcctcctcgggcatcggcaagacaggccagcagcccgctaaaaagagactcaattttggtcagactggcgactcagagtcagtccccgatccacaacctctcggagaacctccagcagccccctcaggtctgggacctaatacaatggcttcaggcggtggcgctccaatggcagacaataacgaaggcgccgacggagtgggtaattcctcgggaaattggcattgcgattccacatggctgggggacagagtcatcaccaccagcacccgaacctgggccctgcccacctacaacaaccacctctacaagcaaatctccaacggcacctcgggaggaagcaccaacgacaacacctattttggctacagcaccccctgggggtattttgacttcaacagattccactgtcacttttcaccacgtgactggcaacgactcatcaacaacaattggggattccggcccaaaagactcaacttcaagctgttcaacatccaggtcaaggaagtcacgacgaacgaaggcaccaagaccatcgccaataatctcaccagcaccgtgcaggtctttacggactcggagtaccagttaccgtacgtgctaggatccgctcaccagggatgtctgcctccgttcccggcggacgtcttcatggttcctcagtacggctatttaactttaaacaatggaagccaagccctgggacgttcctccttctactgtctggagtatttcccatcgcagatgctgagaaccggcaacaactttcagttcagctacaccttcgaggacgtgcctttccacagcagctacgcgcacagccagagcctggacaggctgatgaatcccctcatcgaccagtacctgtactacctggtcagaacgcaaacgactggaactggagggacgcagactctggcattcagccaagcgggtcctagctcaatggccaaccaggctagaaattgggtgcccggaccttgctaccggcagcagcgcgtctccacgacaaccaaccagaacaacaacagcaactttgcctggacgggagctgccaagtttaagctgaacggccgagactctctaatgaatccgggcgtggcaatggcttcccacaaggatgacgacgaccgcttcttcccttcgagcggggtcctgatttttggcaagcaaggagccgggaacgatggagtggattacagccaagtgctgattacagatgaggaagaaatcaaggctaccaaccccgtggccacagaagaatatggagcagtggccatcaacaaccaggccgccaatacgcaggcgcagaccggactcgtgcacaaccagggggtgattcccggcatggtgtggcagaatagagacgtgtacctgcagggtcccatctgggccaaaattcctcacacggacggcaactttcacccgtctcccctgatgggcggctttggactgaagcacccgcctcctcaaattctcatcaagaacacaccggttccagcggacccgccgcttaccttcaaccaggccaagctgaactctttcatcacgcagtacagcaccggacaggtcagcgtggaaatcgagtgggagctgcagaaagaaaacagcaaacgctggaatccagagattcaatacacttccaactactacaaatctacaaatgtggactttgctgtcaacacggagggggtttatagcgagcctcgccccattggcacccgttacctcacccgcaacctgtaa

SEQ ID NO: 1505 - DNA, 2367 bp, Artificial Sequence
  Description of Artificial Sequence: Synthetic polynucleotide
ctggctgccgatggttatcttccagattggctcgaggacaacctctctgagggcattcgcgagtggtgggacttgaaacctggagccccgaagcccaaagccaaccagcaaaagcaggacgacggccggggtctggtgcttcctggctacaagtacctcggacccttcaacggactcgacaagggggagcccgtcaacgcggcggacgcagcggccctcgagcacgacaaggcctacgaccagcagctcaaagcgggtgacaatccgtacctgcggtataaccacgccgacgccgagtttcaggagcgtctgcaagaagatacgtcttttgggggcaacctcgggcgagcagtcttccaggccaagaagcgggttctcgaacctctcggtctggttgaggaaggcgctaagatgccaagcagtgtaatcgatgcgctgcagtacaagctggagggcaccacgaggctgaccaggaagaggggtctgaagctggccacggccctcagccttagcaataagttcgtagagggcagccccagcggcggcggcggcagcggcggcggcggcagcgctcctggaaagaaacgtccggtagagcagtcgccacaagagccagactcctcctcgggcatcggcaagacaggccagcagcccgctaaaaagagactcaattttggtcagactggcgactcagagtcagtccccgatccacaacctctcggagaacctccagcagccccctcaggtctgggacctaatacaatggcttcaggcggtggcgctccaatggcagacaataacgaaggcgccgacggagtgggtaattcctcgggaaattggcattgcgattccacatggctgggggacagagtcatcaccaccagcacccgaacctgggccctgcccacctacaacaaccacctctacaagcaaatctccaacggcacctcgggaggaagcaccaacgacaacacctattttggctacagcaccccctgggggtattttgacttcaacagattccactgtcacttttcaccacgtgactggcaacgactcatcaacaacaattggggattccggcccaaaagactcaacttcaagctgttcaacatccaggtcaaggaagtcacgacgaacgaaggcaccaagaccatcgccaataatctcaccagcaccgtgcaggtctttacggactcggagtaccagttaccgtacgtgctaggatccgctcaccagggatgtctgcctccgttcccggcggacgtcttcatggttcctcagtacggctatttaactttaaacaatggaagccaagccctgggacgttcctccttctactgtctggagtatttcccatcgcagatgctgagaaccggcaacaactttcagttcagctacaccttcgaggacgtgcctttccacagcagctacgcgcacagccagagcctggacaggctgatgaatcccctcatcgaccagtacctgtactacctggtcagaacgcaaacgactggaactggagggacgcagactctggcattcagccaagcgggtcctagctcaatggccaaccaggctagaaattgggtgcccggaccttgctaccggcagcagcgcgtctccacgacaaccaaccagaacaacaacagcaactttgcctggacgggagctgccaagtttaagctgaacggccgagactctctaatgaatccgggcgtggcaatggcttcccacaaggatgacgacgaccgcttcttcccttcgagcggggtcctgatttttggcaagcaaggagccgggaacgatggagtggattacagccaagtgctgattacagatgaggaagaaatcaaggctaccaaccccgtggccacagaagaatatggagcagtggccatcaacaaccaggccgccaatacgcaggcgcagaccggactcgtgcacaaccagggggtgattcccggcatggtgtggcagaatagagacgtgtacctgcagggtcccatctgggccaaaattcctcacacggacggcaactttcacccgtctcccctgatgggcggctttggactgaagcacccgcctcctcaaattctcatcaagaacacaccggttccagcggacccgccgcttaccttcaaccaggccaagctgaactctttcatcacgcagtacagcaccggacaggtcagcgtggaaatcgagtgggagctgcagaaagaaaacagcaaacgctggaatccagagattcaatacacttccaactactacaaatctacaaatgtggactttgctgtcaacacggagggggtttatagcgagcctcgccccattggcacccgttacctcacccgcaacctgtaa

SEQ ID NO: 1506 - DNA, 2328 bp, Artificial Sequence
  Description of Artificial Sequence: Synthetic polynucleotide
ctggctgccgatggttatcttccagattggctcgaggacaacctctctgagggcattcgcgagtggtgggacttgaaacctggagccccgaagcccaaagccaaccagcaaaagcaggacgacggccggggtctggtgcttcctggctacaagtacctcggacccttcaacggactcgacaagggggagcccgtcaacgcggcggacgcagcggccctcgagcacgacaaggcctacgaccagcagctcaaagcgggtgacaatccgtacctgcggtataaccacgccgacgccgagtttcaggagcgtctgcaagaagatacgtcttttgggggcaacctcgggcgagcagtcttccaggccaagaagcgggttctcgaacctctcggtctggttgaggaaggcgctaagatgtataccatctggatgcccgagaaccccaggcccggtaccccctgcgacatcttcaccaacagcaggggcaagcgagccagcaacggcggcggcggcggcagcggcggcggcggcagcgctcctggaaagaaacgtccggtagagcagtcgccacaagagccagactcctcctcgggcatcggcaagacaggccagcagcccgctaaaaagagactcaattttggtcagactggcgactcagagtcagtccccgatccacaacctctcggagaacctccagcagccccctcaggtctgggacctaatacaatggcttcaggcggtggcgctccaatggcagacaataacgaaggcgccgacggagtgggtaattcctcgggaaattggcattgcgattccacatggctgggggacagagtcatcaccaccagcacccgaacctgggccctgcccacctacaacaaccacctctacaagcaaatctccaacggcacctcgggaggaagcaccaacgacaacacctattttggctacagcaccccctgggggtattttgacttcaacagattccactgtcacttttcaccacgtgactggcaacgactcatcaacaacaattggggattccggcccaaaagactcaacttcaagctgttcaacatccaggtcaaggaagtcacgacgaacgaaggcaccaagaccatcgccaataatctcaccagcaccgtgcaggtctttacggactcggagtaccagttaccgtacgtgctaggatccgctcaccagggatgtctgcctccgttcccggcggacgtcttcatggttcctcagtacggctatttaactttaaacaatggaagccaagccctgggacgttcctccttctactgtctggagtatttcccatcgcagatgctgagaaccggcaacaactttcagttcagctacaccttcgaggacgtgcctttccacagcagctacgcgcacagccagagcctggacaggctgatgaatcccctcatcgaccagtacctgtactacctggtcagaacgcaaacgactggaactggagggacgcagactctggcattcagccaagcgggtcctagctcaatggccaaccaggctagaaattgggtgcccggaccttgctaccggcagcagcgcgtctccacgacaaccaaccagaacaacaacagcaactttgcctggacgggagctgccaagtttaagctgaacggccgagactctctaatgaatccgggcgtggcaatggcttcccacaaggatgacgacgaccgcttcttcccttcgagcggggtcctgatttttggcaagcaaggagccgggaacgatggagtggattacagccaagtgctgattacagatgaggaagaaatcaaggctaccaaccccgtggccacagaagaatatggagcagtggccatcaacaaccaggccgccaatacgcaggcgcagaccggactcgtgcacaaccagggggtgattcccggcatggtgtggcagaatagagacgtgtacctgcagggtcccatctgggccaaaattcctcacacggacggcaactttcacccgtctcccctgatgggcggctttggactgaagcacccgcctcctcaaattctcatcaagaacacaccggttccagcggacccgccgcttaccttcaaccaggccaagctgaactctttcatcacgcagtacagcaccggacaggtcagcgtggaaatcgagtgggagctgcagaaagaaaacagcaaacgctggaatccagagattcaatacacttccaactactacaaatctacaaatgtggactttgctgtcaacacggagggggtttatagcgagcctcgccccattggcacccgttacctcacccgcaacctgtaa

SEQ ID NO: 1507 - DNA, 2298 bp, Artificial Sequence
  Description of Artificial Sequence: Synthetic polynucleotide
ctggctgccgatggttatcttccagattggctcgaggacaacctctctgagggcattcgcgagtggtgggacttgaaacctggagccccgaagcccaaagccaaccagcaaaagcaggacgacggccggggtctggtgcttcctggctacaagtacctcggacccttcaacggactcgacaagggggagcccgtcaacgcggcggacgcagcggccctcgagcacgacaaggcctacgaccagcagctcaaagcgggtgacaatccgtacctgcggtataaccacgccgacgccgagtttcaggagcgtctgcaagaagatacgtcttttgggggcaacctcgggcgagcagtcttccaggccaagaagcgggttctcgaacctctcggtctggttgaggaaggcgctaagatgaccttcttctacggcggcagcaggggcaagaggaacaacttcaagaccgaggagtacggcggcggcggcagcggcggcggcggcagcgctcctggaaagaaacgtccggtagagcagtcgccacaagagccagactcctcctcgggcatcggcaagacaggccagcagcccgctaaaaagagactcaattttggtcagactggcgactcagagtcagtccccgatccacaacctctcggagaacctccagcagccccctcaggtctgggacctaatacaatggcttcaggcggtggcgctccaatggcagacaataacgaaggcgccgacggagtgggtaattcctcgggaaattggcattgcgattccacatggctgggggacagagtcatcaccaccagcacccgaacctgggccctgcccacctacaacaaccacctctacaagcaaatctccaacggcacctcgggaggaagcaccaacgacaacacctattttggctacagcaccccctgggggtattttgacttcaacagattccactgtcacttttcaccacgtgactggcaacgactcatcaacaacaattggggattccggcccaaaagactcaacttcaagctgttcaacatccaggtcaaggaagtcacgacgaacgaaggcaccaagaccatcgccaataatctcaccagcaccgtgcaggtctttacggactcggagtaccagttaccgtacgtgctaggatccgctcaccagggatgtctgcctccgttcccggcggacgtcttcatggttcctcagtacggctatttaactttaaacaatggaagccaagccctgggacgttcctccttctactgtctggagtatttcccatcgcagatgctgagaaccggcaacaactttcagttcagctacaccttcgaggacgtgcctttccacagcagctacgcgcacagccagagcctggacaggctgatgaatcccctcatcgaccagtacctgtactacctggtcagaacgcaaacgactggaactggagggacgcagactctggcattcagccaagcgggtcctagctcaatggccaaccaggctagaaattgggtgcccggaccttgctaccggcagcagcgcgtctccacgacaaccaaccagaacaacaacagcaactttgcctggacgggagctgccaagtttaagctgaacggccgagactctctaatgaatccgggcgtggcaatggcttcccacaaggatgacgacgaccgcttcttcccttcgagcggggtcctgatttttggcaagcaaggagccgggaacgatggagtggattacagccaagtgctgattacagatgaggaagaaatcaaggctaccaaccccgtggccacagaagaatatggagcagtggccatcaacaaccaggccgccaatacgcaggcgcagaccggactcgtgcacaaccagggggtgattcccggcatggtgtggcagaatagagacgtgtacctgcagggtcccatctgggccaaaattcctcacacggacggcaactttcacccgtctcccctgatgggcggctttggactgaagcacccgcctcctcaaattctcatcaagaacacaccggttccagcggacccgccgcttaccttcaaccaggccaagctgaactctttcatcacgcagtacagcaccggacaggtcagcgtggaaatcgagtgggagctgcagaaagaaaacagcaaacgctggaatccagagattcaatacacttccaactactacaaatctacaaatgtggactttgctgtcaacacggagggggtttatagcgagcctcgccccattggcacccgttacctcacccgcaacctgtaa

SEQ ID NO: 1508 - DNA, 2211 bp, Artificial Sequence
  Description of Artificial Sequence: Synthetic polynucleotide
atggctgccgatggttatcttccagattggctcgaggacaaccttagtgaaggaattcgcgagtggtgggctttgaaacctggagcccctcaacccaaggcaaatcaacaacatcaagacaacgctcgaggtcttgtgcttccgggttacaaataccttggacccggcaacggactcgacaagggggagccggtcaacgcagcagacgcggcggccctcgagcacgacaaggcctacgaccagcagctcaaggccggagacaacccgtacctcaagtacaaccacgccgacgccgagttccaggagcggctcaaagaagatacgtcttttgggggcaacctcgggcgagcagtcttccaggccaaaaagaggcttcttgaacctcttggtctggttgaggaagcggctaaggcggctcctggaaagaagaggcctgtagagcagtctcctcaggaaccggactcctccgcgggtattggcaaatcgggtgcacagcccgctaaaaagagactcaatttcggtcagactggcgacacagagtcagtcccagaccctcaaccaatcggagaacctcccgcagccccctcaggtgtgggatctcttacaatggcttcaggtggtggcgcaccagtggcagacaataacgaaggtgccgatggagtgggtagttcctcgggaaattggcattgcgattcccaatggctgggggacagagtcatcaccaccagcacccgaacctgggccctgcccacctacaacaatcacctctacaagcaaatctccaacagcacatctggaggatcttcaaatgacaacgcctacttcggctacagcaccccctgggggtattttgacttcaacagattccactgccacttctcaccacgtgactggcagcgactcatcaacaacaactggggattccggcctaagcgactcaacttcaagctcttcaacattcaggtcaaagaggttacggacaacaatggagtcaagaccatcgccaataaccttaccagcacggtccaggtcttcacggactcagactatcagctcccgtacgtgctcgggtcggctcacgagggctgcctcccgccgttcccagcggacgttttcatgattcctcagtacgggtatctgacgcttaatgatggaagccaggccgtgggtcgttcgtccttttactgcctggaatatttcccgtcgcaaatgctaagaacgggtaacaacttccagttcaactacgagtttgagaacgtacctttccatagcagctacgctcacagccaaagcctggaccgactaatgaatccactcatcgaccaatacttgtactatctctcaaagactattaacgattctggacagaatcaacaaacgctaaaattcagtgtggccggacccagcaacatggctgtccagggaagaaactacatacctggacccagctaccgacaacaacgtgtctcaaccactgtgactcaaaacaacaacagcgaatttgcttggcctggagcttcttcttgggctctcaatggacgtaatagcttgatgaatcctggacctgctatggccagccacaaagaaggagaggaccgtttctttcctttgtctggatctttaatttttggcaaacaaggaactggaagagacaacgtggatgcggacgaagtcatgataaccaacgaagaagaaattaaaactactaacccggtagcaacggagtcctatggacaagtggccataaaccaccagagtgcccaagcacaggcgcagaccggctgggttcaaaaccaaggaatacttccgggtatggtttggcaggacagagatgtgtacctgcaaggacccatttgggccaaaattcctcacacggacggcaactttcacccttctccgctgatgggagggtttggaatgaagcacccgcctcctcagatcctcatcaaaaacacacctgtacctgcggatcctccaacggccttcaacaaggacaagctgaactctttcatcacccagtattctactggccaagtcagcgtggagatcgagtgggagctgcagaaggaaaacagcaagcgctggaacccggagatccagtacacttccaactattacaagtctaataatgttgaatttgctgttaatactgaaggtgtatatagtgaaccccgccccattggcaccagatacctgactcgtaatctgtaa

SEQ ID NO: 1509 - DNA, 2277 bp, Artificial Sequence
  Description of Artificial Sequence: Synthetic polynucleotide
ctggctgccgatggttatcttccagattggctcgaggacaaccttagtgaaggaattcgcgagtggtgggctttgaaacctggagcccctcaacccaaggcaaatcaacaacatcaagacaacgctcgaggtcttgtgcttccgggttacaaataccttggacccggcaacggactcgacaagggggagccggtcaacgcagcagacgcggcggccctcgagcacgacaaggcctacgaccagcagctcaaggccggagacaacccgtacctcaagtacaaccacgccgacgccgagttccaggagcggctcaaagaagatacgtcttttgggggcaacctcgggcgagcagtcttccaggccaaaaagaggcttcttgaacctcttggtctggttgaggaagcggctaagatgaacaaccagaagatcgtgaacctgaaggagaaggtggcccagctggaggccggcggcggcggcagcgctcctggaaagaagaggcctgtagagcagtctcctcaggaaccggactcctccgcgggtattggcaaatcgggtgcacagcccgctaaaaagagactcaatttcggtcagactggcgacacagagtcagtcccagaccctcaaccaatcggagaacctcccgcagccccctcaggtgtgggatctcttacaatggcttcaggtggtggcgcaccagtggcagacaataacgaaggtgccgatggagtgggtagttcctcgggaaattggcattgcgattcccaatggctgggggacagagtcatcaccaccagcacccgaacctgggccctgcccacctacaacaatcacctctacaagcaaatctccaacagcacatctggaggatcttcaaatgacaacgcctacttcggctacagcaccccctgggggtattttgacttcaacagattccactgccacttctcaccacgtgactggcagcgactcatcaacaacaactggggattccggcctaagcgactcaacttcaagctcttcaacattcaggtcaaagaggttacggacaacaatggagtcaagaccatcgccaataaccttaccagcacggtccaggtcttcacggactcagactatcagctcccgtacgtgctcgggtcggctcacgagggctgcctcccgccgttcccagcggacgttttcatgattcctcagtacgggtatctgacgcttaatgatggaagccaggccgtgggtcgttcgtccttttactgcctggaatatttcccgtcgcaaatgctaagaacgggtaacaacttccagttcaactacgagtttgagaacgtacctttccatagcagctacgctcacagccaaagcctggaccgactaatgaatccactcatcgaccaatacttgtactatctctcaaagactattaacgattctggacagaatcaacaaacgctaaaattcagtgtggccggacccagcaacatggctgtccagggaagaaactacatacctggacccagctaccgacaacaacgtgtctcaaccactgtgactcaaaacaacaacagcgaatttgcttggcctggagcttcttcttgggctctcaatggacgtaatagcttgatgaatcctggacctgctatggccagccacaaagaaggagaggaccgtttctttcctttgtctggatctttaatttttggcaaacaaggaactggaagagacaacgtggatgcggacgaagtcatgataaccaacgaagaagaaattaaaactactaacccggtagcaacggagtcctatggacaagtggccataaaccaccagagtgcccaagcacaggcgcagaccggctgggttcaaaaccaaggaatacttccgggtatggtttggcaggacagagatgtgtacctgcaaggacccatttgggccaaaattcctcacacggacggcaactttcacccttctccgctgatgggagggtttggaatgaagcacccgcctcctcagatcctcatcaaaaacacacctgtacctgcggatcctccaacggccttcaacaaggacaagctgaactctttcatcacccagtattctactggccaagtcagcgtggagatcgagtgggagctgcagaaggaaaacagcaagcgctggaacccggagatccagtacacttccaactattacaagtctaataatgttgaatttgctgttaatactgaaggtgtatatagtgaaccccgccccattggcaccagatacctgactcgtaatctgtaa

SEQ ID NO: 1510 - DNA, 2313 bp, Artificial Sequence
  Description of Artificial Sequence: Synthetic polynucleotide
ctggctgccgatggttatcttccagattggctcgaggacaaccttagtgaaggaattcgcgagtggtgggctttgaaacctggagcccctcaacccaaggcaaatcaacaacatcaagacaacgctcgaggtcttgtgcttccgggttacaaataccttggacccggcaacggactcgacaagggggagccggtcaacgcagcagacgcggcggccctcgagcacgacaaggcctacgaccagcagctcaaggccggagacaacccgtacctcaagtacaaccacgccgacgccgagttccaggagcggctcaaagaagatacgtcttttgggggcaacctcgggcgagcagtcttccaggccaaaaagaggcttcttgaacctcttggtctggttgaggaagcggctaagatgtataccatctggatgcccgagaaccccaggcccggtaccccctgcgacatcttcaccaacagcaggggcaagcgagccagcaacggcggcggcggcggcagcgctcctggaaagaagaggcctgtagagcagtctcctcaggaaccggactcctccgcgggtattggcaaatcgggtgcacagcccgctaaaaagagactcaatttcggtcagactggcgacacagagtcagtcccagaccctcaaccaatcggagaacctcccgcagccccctcaggtgtgggatctcttacaatggcttcaggtggtggcgcaccagtggcagacaataacgaaggtgccgatggagtgggtagttcctcgggaaattggcattgcgattcccaatggctgggggacagagtcatcaccaccagcacccgaacctgggccctgcccacctacaacaatcacctctacaagcaaatctccaacagcacatctggaggatcttcaaatgacaacgcctacttcggctacagcaccccctgggggtattttgacttcaacagattccactgccacttctcaccacgtgactggcagcgactcatcaacaacaactggggattccggcctaagcgactcaacttcaagctcttcaacattcaggtcaaagaggttacggacaacaatggagtcaagaccatcgccaataaccttaccagcacggtccaggtcttcacggactcagactatcagctcccgtacgtgctcgggtcggctcacgagggctgcctcccgccgttcccagcggacgttttcatgattcctcagtacgggtatctgacgcttaatgatggaagccaggccgtgggtcgttcgtccttttactgcctggaatatttcccgtcgcaaatgctaagaacgggtaacaacttccagttcaactacgagtttgagaacgtacctttccatagcagctacgctcacagccaaagcctggaccgactaatgaatccactcatcgaccaatacttgtactatctctcaaagactattaacgattctggacagaatcaacaaacgctaaaattcagtgtggccggacccagcaacatggctgtccagggaagaaactacatacctggacccagctaccgacaacaacgtgtctcaaccactgtgactcaaaacaacaacagcgaatttgcttggcctggagcttcttcttgggctctcaatggacgtaatagcttgatgaatcctggacctgctatggccagccacaaagaaggagaggaccgtttctttcctttgtctggatctttaatttttggcaaacaaggaactggaagagacaacgtggatgcggacgaagtcatgataaccaacgaagaagaaattaaaactactaacccggtagcaacggagtcctatggacaagtggccataaaccaccagagtgcccaagcacaggcgcagaccggctgggttcaaaaccaaggaatacttccgggtatggtttggcaggacagagatgtgtacctgcaaggacccatttgggccaaaattcctcacacggacggcaactttcacccttctccgctgatgggagggtttggaatgaagcacccgcctcctcagatcctcatcaaaaacacacctgtacctgcggatcctccaacggccttcaacaaggacaagctgaactctttcatcacccagtattctactggccaagtcagcgtggagatcgagtgggagctgcagaaggaaaacagcaagcgctggaacccggagatccagtacacttccaactattacaagtctaataatgttgaatttgctgttaatactgaaggtgtatatagtgaaccccgccccattggcaccagatacctgactcgtaatctgtaa

SEQ ID NO: 1511 - DNA, 2283 bp, Artificial Sequence
  Description of Artificial Sequence: Synthetic polynucleotide
ctggctgccgatggttatcttccagattggctcgaggacaaccttagtgaaggaattcgcgagtggtgggctttgaaacctggagcccctcaacccaaggcaaatcaacaacatcaagacaacgctcgaggtcttgtgcttccgggttacaaataccttggacccggcaacggactcgacaagggggagccggtcaacgcagcagacgcggcggccctcgagcacgacaaggcctacgaccagcagctcaaggccggagacaacccgtacctcaagtacaaccacgccgacgccgagttccaggagcggctcaaagaagatacgtcttttgggggcaacctcgggcgagcagtcttccaggccaaaaagaggcttcttgaacctcttggtctggttgaggaagcggctaagatgaccttcttctacggcggcagcaggggcaagaggaacaacttcaagaccgaggagtacggcggcggcggcagcgctcctggaaagaagaggcctgtagagcagtctcctcaggaaccggactcctccgcgggtattggcaaatcgggtgcacagcccgctaaaaagagactcaatttcggtcagactggcgacacagagtcagtcccagaccctcaaccaatcggagaacctcccgcagccccctcaggtgtgggatctcttacaatggcttcaggtggtggcgcaccagtggcagacaataacgaaggtgccgatggagtgggtagttcctcgggaaattggcattgcgattcccaatggctgggggacagagtcatcaccaccagcacccgaacctgggccctgcccacctacaacaatcacctctacaagcaaatctccaacagcacatctggaggatcttcaaatgacaacgcctacttcggctacagcaccccctgggggtattttgacttcaacagattccactgccacttctcaccacgtgactggcagcgactcatcaacaacaactggggattccggcctaagcgactcaacttcaagctcttcaacattcaggtcaaagaggttacggacaacaatggagtcaagaccatcgccaataaccttaccagcacggtccaggtcttcacggactcagactatcagctcccgtacgtgctcgggtcggctcacgagggctgcctcccgccgttcccagcggacgttttcatgattcctcagtacgggtatctgacgcttaatgatggaagccaggccgtgggtcgttcgtccttttactgcctggaatatttcccgtcgcaaatgctaagaacgggtaacaacttccagttcaactacgagtttgagaacgtacctttccatagcagctacgctcacagccaaagcctggaccgactaatgaatccactcatcgaccaatacttgtactatctctcaaagactattaacgattctggacagaatcaacaaacgctaaaattcagtgtggccggacccagcaacatggctgtccagggaagaaactacatacctggacccagctaccgacaacaacgtgtctcaaccactgtgactcaaaacaacaacagcgaatttgcttggcctggagcttcttcttgggctctcaatggacgtaatagcttgatgaatcctggacctgctatggccagccacaaagaaggagaggaccgtttctttcctttgtctggatctttaatttttggcaaacaaggaactggaagagacaacgtggatgcggacgaagtcatgataaccaacgaagaagaaattaaaactactaacccggtagcaacggagtcctatggacaagtggccataaaccaccagagtgcccaagcacaggcgcagaccggctgggttcaaaaccaaggaatacttccgggtatggtttggcaggacagagatgtgtacctgcaaggacccatttgggccaaaattcctcacacggacggcaactttcacccttctccgctgatgggagggtttggaatgaagcacccgcctcctcagatcctcatcaaaaacacacctgtacctgcggatcctccaacggccttcaacaaggacaagctgaactctttcatcacccagtattctactggccaagtcagcgtggagatcgagtgggagctgcagaaggaaaacagcaagcgctggaacccggagatccagtacacttccaactattacaagtctaataatgttgaatttgctgttaatactgaaggtgtatatagtgaaccccgccccattggcaccagatacctgactcgtaatctgtaa

SEQ ID NO: 1512 - DNA, 2283 bp, Artificial Sequence
  Description of Artificial Sequence: Synthetic polynucleotide
ctggctgccgatggttatcttccagattggctcgaggacaaccttagtgaaggaattcgcgagtggtgggctttgaaacctggagcccctcaacccaaggcaaatcaacaacatcaagacaacgctcgaggtcttgtgcttccgggttacaaataccttggacccggcaacggactcgacaagggggagccggtcaacgcagcagacgcggcggccctcgagcacgacaaggcctacgaccagcagctcaaggccggagacaacccgtacctcaagtacaaccacgccgacgccgagttccaggagcggctcaaagaagatacgtcttttgggggcaacctcgggcgagcagtcttccaggccaaaaagaggcttcttgaacctcttggtctggttgaggaagcggctaagatggcagctgcggccgccgcggctgcagcggctgcagccgccgcagctgcggctgcagcgggcggcggcggcagcgctcctggaaagaagaggcctgtagagcagtctcctcaggaaccggactcctccgcgggtattggcaaatcgggtgcacagcccgctaaaaagagactcaatttcggtcagactggcgacacagagtcagtcccagaccctcaaccaatcggagaacctcccgcagccccctcaggtgtgggatctcttacaatggcttcaggtggtggcgcaccagtggcagacaataacgaaggtgccgatggagtgggtagttcctcgggaaattggcattgcgattcccaatggctgggggacagagtcatcaccaccagcacccgaacctgggccctgcccacctacaacaatcacctctacaagcaaatctccaacagcacatctggaggatcttcaaatgacaacgcctacttcggctacagcaccccctgggggtattttgacttcaacagattccactgccacttctcaccacgtgactggcagcgactcatcaacaacaactggggattccggcctaagcgactcaacttcaagctcttcaacattcaggtcaaagaggttacggacaacaatggagtcaagaccatcgccaataaccttaccagcacggtccaggtcttcacggactcagactatcagctcccgtacgtgctcgggtcggctcacgagggctgcctcccgccgttcccagcggacgttttcatgattcctcagtacgggtatctgacgcttaatgatggaagccaggccgtgggtcgttcgtccttttactgcctggaatatttcccgtcgcaaatgctaagaacgggtaacaacttccagttcaactacgagtttgagaacgtacctttccatagcagctacgctcacagccaaagcctggaccgactaatgaatccactcatcgaccaatacttgtactatctctcaaagactattaacgattctggacagaatcaacaaacgctaaaattcagtgtggccggacccagcaacatggctgtccagggaagaaactacatacctggacccagctaccgacaacaacgtgtctcaaccactgtgactcaaaacaacaacagcgaatttgcttggcctggagcttcttcttgggctctcaatggacgtaatagcttgatgaatcctggacctgctatggccagccacaaagaaggagaggaccgtttctttcctttgtctggatctttaatttttggcaaacaaggaactggaagagacaacgtggatgcggacgaagtcatgataaccaacgaagaagaaattaaaactactaacccggtagcaacggagtcctatggacaagtggccataaaccaccagagtgcccaagcacaggcgcagaccggctgggttcaaaaccaaggaatacttccgggtatggtttggcaggacagagatgtgtacctgcaaggacccatttgggccaaaattcctcacacggacggcaactttcacccttctccgctgatgggagggtttggaatgaagcacccgcctcctcagatcctcatcaaaaacacacctgtacctgcggatcctccaacggccttcaacaaggacaagctgaactctttcatcacccagtattctactggccaagtcagcgtggagatcgagtgggagctgcagaaggaaaacagcaagcgctggaacccggagatccagtacacttccaactattacaagtctaataatgttgaatttgctgttaatactgaaggtgtatatagtgaaccccgccccattggcaccagatacctgactcgtaatctgtaa

SEQ ID NO: 1513 - protein, 726 aa, Artificial Sequence
  Description of Artificial Sequence: Synthetic polypeptide
MEVQLQASGGGLVQAGGSLRLSCAASGFKITHYTMGWFRQAPGKEREFVSRITWGGDNTFYSNSVKGRFTISRDNAKNTVYLQMNSLKPEDTADYYCAAGSTSTATPLRVDYWGKGTQVTVSSGGGGSAPGKKRPVEQSPQEPDSSSGIGKTGQQPAKKRLNFGQTGDSESVPDPQPLGEPPAAPSGLGPNTMASGGGAPMADNNEGADGVGNSSGNWHCDSTWLGDRVITTSTRTWALPTYNNHLYKQISNGTSGGSTNDNTYFGYSTPWGYFDFNRFHCHFSPRDWQRLINNNWGFRPKRLNFKLFNIQVKEVTTNEGTKTIANNLTSTVQVFTDSEYQLPYVLGSAHQGCLPPFPADVFMVPQYGYLTLNNGSQALGRSSFYCLEYFPSQMLRTGNNFQFSYTFEDVPFHSSYAHSQSLDRLMNPLIDQYLYYLVRTQTTGTGGTQTLAFSQAGPSSMANQARNWVPGPCYRQQRVSTTTNQNNNSNFAWTGAAKFKLNGRDSLMNPGVAMASHKDDDDRFFPSSGVLIFGKQGAGNDGVDYSQVLITDEEEIKATNPVATEEYGAVAINNQAANTQAQTGLVHNQGVIPGMVWQNRDVYLQGPIWAKIPHTDGNFHPSPLMGGFGLKHPPPQILIKNTPVPADPPLTFNQAKLNSFITQYSTGQVSVEIEWELQKENSKRWNPEIQYTSNYYKSTNVDFAVNTEGVYSEPRPIGTRYLTRNL

SEQ ID NO: 1514 - protein, 729 aa, Artificial Sequence
  Description of Artificial Sequence: Synthetic polypeptide
MEVQLQASGGGLVQAGGSLRLSCSASVRTFSIYAMGWFRQAPGKEREFVAGINRSGDVTKYADFVKGRFSISRDNAKNMVYLQMNSLKPEDTALYYCAATWAYDTVGALTSGYNFWGQGTQVTVSSGGGGSAPGKKRPVEQSPQEPDSSSGIGKTGQQPAKKRLNFGQTGDSESVPDPQPLGEPPAAPSGLGPNTMASGGGAPMADNNEGADGVGNSSGNWHCDSTWLGDRVITTSTRTWALPTYNNHLYKQISNGTSGGSTNDNTYFGYSTPWGYFDFNRFHCHFSPRDWQRLINNNWGFRPKRLNFKLFNIQVKEVTTNEGTKTIANNLTSTVQVFTDSEYQLPYVLGSAHQGCLPPFPADVFMVPQYGYLTLNNGSQALGRSSFYCLEYFPSQMLRTGNNFQFSYTFEDVPFHSSYAHSQSLDRLMNPLIDQYLYYLVRTQTTGTGGTQTLAFSQAGPSSMANQARNWVPGPCYRQQRVSTTTNQNNNSNFAWTGAAKFKLNGRDSLMNPGVAMASHKDDDDRFFPSSGVLIFGKQGAGNDGVDYSQVLITDEEEIKATNPVATEEYGAVAINNQAANTQAQTGLVHNQGVIPGMVWQNRDVYLQGPIWAKIPHTDGNFHPSPLMGGFGLKHPPPQILIKNTPVPADPPLTFNQAKLNSFITQYSTGQVSVEIEWELQKENSKRWNPEIQYTSNYYKSTNVDFAVNTEGVYSEPRPIGTRYLTRNL

SEQ ID NO: 1515 - protein, 651 aa, Artificial Sequence
  Description of Artificial Sequence: Synthetic polypeptide
MPSSVIDALQYKLEGTTRLTRKRGLKLATALSLSNKFVEGSPSGGGGSGGGGSAPGKKRPVEQSPQEPDSSSGIGKTGQQPAKKRLNFGQTGDSESVPDPQPLGEPPAAPSGLGPNTMASGGGAPMADNNEGADGVGNSSGNWHCDSTWLGDRVITTSTRTWALPTYNNHLYKQISNGTSGGSTNDNTYFGYSTPWGYFDFNRFHCHFSPRDWQRLINNNWGFRPKRLNFKLFNIQVKEVTTNEGTKTIANNLTSTVQVFTDSEYQLPYVLGSAHQGCLPPFPADVFMVPQYGYLTLNNGSQALGRSSFYCLEYFPSQMLRTGNNFQFSYTFEDVPFHSSYAHSQSLDRLMNPLIDQYLYYLVRTQTTGTGGTQTLAFSQAGPSSMANQARNWVPGPCYRQQRVSTTTNQNNNSNFAWTGAAKFKLNGRDSLMNPGVAMASHKDDDDRFFPSSGVLIFGKQGAGNDGVDYSQVLITDEEEIKATNPVATEEYGAVAINNQAANTQAQTGLVHNQGVIPGMVWQNRDVYLQGPIWAKIPHTDGNFHPSPLMGGFGLKHPPPQILIKNTPVPADPPLTFNQAKLNSFITQYSTGQVSVEIEWELQKENSKRWNPEIQYTSNYYKSTNVDFAVNTEGVYSEPRPIGTRYLTRNL

SEQ ID NO: 1516 - protein, 638 aa, Artificial Sequence
  Description of Artificial Sequence: Synthetic polypeptide
MYTIWMPENPRPGTPCDIFTNSRGKRASNGGGGGSGGGGSAPGKKRPVEQSPQEPDSSSGIGKTGQQPAKKRLNFGQTGDSESVPDPQPLGEPPAAPSGLGPNTMASGGGAPMADNNEGADGVGNSSGNWHCDSTWLGDRVITTSTRTWALPTYNNHLYKQISNGTSGGSTNDNTYFGYSTPWGYFDFNRFHCHFSPRDWQRLINNNWGFRPKRLNFKLFNIQVKEVTTNEGTKTIANNLTSTVQVFTDSEYQLPYVLGSAHQGCLPPFPADVFMVPQYGYLTLNNGSQALGRSSFYCLEYFPSQMLRTGNNFQFSYTFEDVPFHSSYAHSQSLDRLMNPLIDQYLYYLVRTQTTGTGGTQTLAFSQAGPSSMANQARNWVPGPCYRQQRVSTTTNQNNNSNFAWTGAAKFKLNGRDSLMNPGVAMASHKDDDDRFFPSSGVLIFGKQGAGNDGVDYSQVLITDEEEIKATNPVATEEYGAVAINNQAANTQAQTGLVHNQGVIPGMVWQNRDVYLQGPIWAKIPHTDGNFHPSPLMGGFGLKHPPPQILIKNTPVPADPPLTFNQAKLNSFITQYSTGQVSVEIEWELQKENSKRWNPEIQYTSNYYKSTNVDFAVNTEGVYSEPRPIGTRYLTRNL

SEQ ID NO: 1517 - protein, 628 aa, Artificial Sequence
  Description of Artificial Sequence: Synthetic polypeptide
MTFFYGGSRGKRNNFKTEEYGGGGSGGGGSAPGKKRPVEQSPQEPDSSSGIGKTGQQPAKKRLNFGQTGDSESVPDPQPLGEPPAAPSGLGPNTMASGGGAPMADNNEGADGVGNSSGNWHCDSTWLGDRVITTSTRTWALPTYNNHLYKQISNGTSGGSTNDNTYFGYSTPWGYFDFNRFHCHFSPRDWQRLINNNWGFRPKRLNFKLFNIQVKEVTTNEGTKTIANNLTSTVQVFTDSEYQLPYVLGSAHQGCLPPFPADVFMVPQYGYLTLNNGSQALGRSSFYCLEYFPSQMLRTGNNFQFSYTFEDVPFHSSYAHSQSLDRLMNPLIDQYLYYLVRTQTTGTGGTQTLAFSQAGPSSMANQARNWVPGPCYRQQRVSTTTNQNNNSNFAWTGAAKFKLNGRDSLMNPGVAMASHKDDDDRFFPSSGVLIFGKQGAGNDGVDYSQVLITDEEEIKATNPVATEEYGAVAINNQAANTQAQTGLVHNQGVIPGMVWQNRDVYLQGPIWAKIPHTDGNFHPSPLMGGFGLKHPPPQILIKNTPVPADPPLTFNQAKLNSFITQYSTGQVSVEIEWELQKENSKRWNPEIQYTSNYYKSTNVDFAVNTEGVYSEPRPIGTRYLTRNL

SEQ ID NO: 1518 - protein, 621 aa, Artificial Sequence
  Description of Artificial Sequence: Synthetic polypeptide
MNNQKIVNLKEKVAQLEAGGGGSAPGKKRPVEQSPQEPDSSAGIGKSGAQPAKKRLNFGQTGDTESVPDPQPIGEPPAAPSGVGSLTMASGGGAPVADNNEGADGVGSSSGNWHCDSQWLGDRVITTSTRTWALPTYNNHLYKQISNSTSGGSSNDNAYFGYSTPWGYFDFNRFHCHFSPRDWQRLINNNWGFRPKRLNFKLFNIQVKEVTDNNGVKTIANNLTSTVQVFTDSDYQLPYVLGSAHEGCLPPFPADVFMIPQYGYLTLNDGSQAVGRSSFYCLEYFPSQMLRTGNNFQFNYEFENVPFHSSYAHSQSLDRLMNPLIDQYLYYLSKTINDSGQNQQTLKFSVAGPSNMAVQGRNYIPGPSYRQQRVSTTVTQNNNSEFAWPGASSWALNGRNSLMNPGPAMASHKEGEDRFFPLSGSLIFGKQGTGRDNVDADEVMITNEEEIKTTNPVATESYGQVAINHQSAQAQAQTGWVQNQGILPGMVWQDRDVYLQGPIWAKIPHTDGNFHPSPLMGGFGMKHPPPQILIKNTPVPADPPTAFNKDKLNSFITQYSTGQVSVEIEWELQKENSKRWNPEIQYTSNYYKSNNVEFAVNTEGVYSEPRPIGTRYLTRNL

SEQ ID NO: 1519 - protein, 633 aa, Artificial Sequence
  Description of Artificial Sequence: Synthetic polypeptide
MYTIWMPENPRPGTPCDIFTNSRGKRASNGGGGGSAPGKKRPVEQSPQEPDSSAGIGKSGAQPAKKRLNFGQTGDTESVPDPQPIGEPPAAPSGVGSLTMASGGGAPVADNNEGADGVGSSSGNWHCDSQWLGDRVITTSTRTWALPTYNNHLYKQISNSTSGGSSNDNAYFGYSTPWGYFDFNRFHCHFSPRDWQRLINNNWGFRPKRLNFKLFNIQVKEVTDNNGVKTIANNLTSTVQVFTDSDYQLPYVLGSAHEGCLPPFPADVFMIPQYGYLTLNDGSQAVGRSSFYCLEYFPSQMLRTGNNFQFNYEFENVPFHSSYAHSQSLDRLMNPLIDQYLYYLSKTINDSGQNQQTLKFSVAGPSNMAVQGRNYIPGPSYRQQRVSTTVTQNNNSEFAWPGASSWALNGRNSLMNPGPAMASHKEGEDRFFPLSGSLIFGKQGTGRDNVDADEVMITNEEEIKTTNPVATESYGQVAINHQSAQAQAQTGWVQNQGILPGMVWQDRDVYLQGPIWAKIPHTDGNFHPSPLMGGFGMKHPPPQILIKNTPVPADPPTAFNKDKLNSFITQYSTGQVSVEIEWELQKENSKRWNPEIQYTSNYYKSNNVEFAVNTEGVYSEPRPIGTRYLTRNL

SEQ ID NO: 1520 - protein, 623 aa, Artificial Sequence
  Description of Artificial Sequence: Synthetic polypeptide
MTFFYGGSRGKRNNFKTEEYGGGGSAPGKKRPVEQSPQEPDSSAGIGKSGAQPAKKRLNFGQTGDTESVPDPQPIGEPPAAPSGVGSLTMASGGGAPVADNNEGADGVGSSSGNWHCDSQWLGDRVITTSTRTWALPTYNNHLYKQISNSTSGGSSNDNAYFGYSTPWGYFDFNRFHCHFSPRDWQRLINNNWGFRPKRLNFKLFNIQVKEVTDNNGVKTIANNLTSTVQVFTDSDYQLPYVLGSAHEGCLPPFPADVFMIPQYGYLTLNDGSQAVGRSSFYCLEYFPSQMLRTGNNFQFNYEFENVPFHSSYAHSQSLDRLMNPLIDQYLYYLSKTINDSGQNQQTLKFSVAGPSNMAVQGRNYIPGPSYRQQRVSTTVTQNNNSEFAWPGASSWALNGRNSLMNPGPAMASHKEGEDRFFPLSGSLIFGKQGTGRDNVDADEVMITNEEEIKTTNPVATESYGQVAINHQSAQAQAQTGWVQNQGILPGMVWQDRDVYLQGPIWAKIPHTDGNFHPSPLMGGFGMKHPPPQILIKNTPVPADPPTAFNKDKLNSFITQYSTGQVSVEIEWELQKENSKRWNPEIQYTSNYYKSNNVEFAVNTEGVYSEPRPIGTRYLTRNL

SEQ ID NO: 1521 - protein, 623 aa, Artificial Sequence
  Description of Artificial Sequence: Synthetic polypeptide
MAAAAAAAAAAAAAAAAAAAGGGGSAPGKKRPVEQSPQEPDSSAGIGKSGAQPAKKRLNFGQTGDTESVPDPQPIGEPPAAPSGVGSLTMASGGGAPVADNNEGADGVGSSSGNWHCDSQWLGDRVITTSTRTWALPTYNNHLYKQISNSTSGGSSNDNAYFGYSTPWGYFDFNRFHCHFSPRDWQRLINNNWGFRPKRLNFKLFNIQVKEVTDNNGVKTIANNLTSTVQVFTDSDYQLPYVLGSAHEGCLPPFPADVFMIPQYGYLTLNDGSQAVGRSSFYCLEYFPSQMLRTGNNFQFNYEFENVPFHSSYAHSQSLDRLMNPLIDQYLYYLSKTINDSGQNQQTLKFSVAGPSNMAVQGRNYIPGPSYRQQRVSTTVTQNNNSEFAWPGASSWALNGRNSLMNPGPAMASHKEGEDRFFPLSGSLIFGKQGTGRDNVDADEVMITNEEEIKTTNPVATESYGQVAINHQSAQAQAQTGWVQNQGILPGMVWQDRDVYLQGPIWAKIPHTDGNFHPSPLMGGFGMKHPPPQILIKNTPVPADPPTAFNKDKLNSFITQYSTGQVSVEIEWELQKENSKRWNPEIQYTSNYYKSNNVEFAVNTEGVYSEPRPIGTRYLTRNL

SEQ ID NO: 1522 - DNA, 2214 bp, Artificial Sequence
  Description of Artificial Sequence: Synthetic polynucleotide
atggctgccgatggttatcttccagattggctcgaggacaacctctctgagggcattcgcgagtggtgggacttgaaacctggagccccgaagcccaaagccaaccagcaaaagcaggacgacggccggggtctggtgcttcctggctacaagtacctcggacccttcaacggactcgacaagggggagcccgtcaacgcggcggacgcagcggccctcgagcacgacaaggcctacgaccagcagctcaaagcgggtgacaatccgtacctgcggtataaccacgccgacgtcgagtttcaggagcgtctgcaagaagatacgtcttttgggggcaacctcgggcgagcagtcttccaggccaagaagagggttctcgaaccttttggtctggttgaggaaggcgctaagacggctcctggaaagaaacgtccggtagagcagtcgccacaagagccagactcctcctcgggcatcggcaagaaaggccaacagcccgccagaaaaagactcaattttggccagactggcgactcagagtcagttccagaccctcaacctctcggagaacctccagcagcgccctctggtgtgggacctaatacaatggctgcaggcggtggcgcaccaatggcagacaataacgagggcgccgacggagtgggtaattcctcgggaaattggcattgcgattccacatggatgggggacagagtcatcaccaccagcacccgaacctgggccctgcccacctacaacaaccacctctacaagcaaatctccaacggcacctcgggaggaagcaccaacgacaacacctattttggctacagcaccccctgggggtattttgatttcaacagattccactgccacttctcaccacgtgactggcagcgactcatcaacaacaactggggattccggccaaaaagactcagcttcaagctcttcaacatccaggtcaaggaggtcacgcagaatgaaggcaccaagaccatcgccaataaccttaccagcacgattcaggtatttacggactcggaataccagctgccatacgtcctcggctccgcgcaccagggctgcctgcctccgttcccggcggacgtcttcatgattccccagtacggctaccttacactgaacaatggaagtcaagccgtaggccgttcctccttctactgcctggaatattttccttctcaaatgctgagaacgggcaacaactttgagttcagctaccagtttgaggacgtgccttttcacagcagctacgcgcacagccaaagcctggaccggctgatgaaccccctcatcgaccagtacctgtactacctgtctcggactcagtccacgggaggtaccgcaagaactcagcagttgctattttctcaggccgggcctaatacaatggccaatcaggcaaagaactggctgccaggaccctgttaccgccaacaacgcgtctcaacgacaaccgggcaaaacaacaatagcaactctgcctggactgctgggaccaaataccatctgaatggaagaaattcattggctaatcctggcatcgctatggcaacacacaaagacgacgaggagcgtttttttcccagtaacgggatcctgatttttggcaaacaaaatgctgccagagacaatgcggattacagcgatgtcatgctcaccagcgaggaagaaatcaaaaccactaaccctgtggctacagaggaatacggtatcgtggcagataacttgcagcagcaaaacacggctcctcaaattggaactgtcaacagccagggggccttacccggtatggtctggcagaaccgggacgtgtacctgcagggtcccatctgggccaagattcctcacacggacggcaacttccacccatctccgctgatgggcggctttggcctgaaacatcctccgcctcagatcctgatcaagaacacgcctgtacctgcggatcctccgaccaccttcaaccagtcaaagctgaactctttcatcacgcaatacagcaccggacaggtcagcgtggaaattgaatgggagctacagaaggaaaacagcaagcgctggaaccccgagatccagtacacctccaactactacaaatctacaagtgtggactttgctgttaatacagaaggcgtgtactctgaaccccgccccattggcacccgttacctcacccgtaatctgtaa

SEQ ID NO: 1523 - DNA, 2214 bp, Artificial Sequence
  Description of Artificial Sequence: Synthetic polynucleotide
atggctgccgatggttatcttccagattggctcgaggacaacctctctgagggcattcgcgagtggtgggcgctgaaacctggagccccgaagcccaaagccaaccagcaaaagcaggacgacggccggggtctggtgcttcctggctacaagtacctcggacccttcaacggactcgacaagggggagcccgtcaacgcggcggacgcagcggccctcgagcacgacaaggcctacgaccagcagctcaaagcgggtgacaatccgtacctgcggtataaccacgccgacgccgagtttcaggagcgtctgcaagaagatacgtcttttgggggcaacctcgggcgagcagtcttccaggccaagaagcgggttctcgaacctctcggtctggttgaggacggcgctaagacggctcctggaaagaagagaccagtagagcagtcaccccaagaaccagactcctcctcgggcatcggcaagaaaggccaacagcccgccagaaaaagactcaattttggccagactggcgactcagagtcagttccagaccctcaacctctcggagaacctccagcaacccccgctgctgtgggacctactacaatggcttcaggcggtggcgcaccaatggcagacaataacgaaggcgccgacggagtgggtagttcctcgggaaattggcattgcgattccacatggctgggcgacagagtcatcaccaccagcacccgaacctgggccctgcccacctacaacaaccacctctacaagcaaatctccaacgggacatcgggaggagccaccaacgacaacacctacttcggctacagcaccccctgggggtattttgactttaacagattccactgccacttttcaccacgtgactggcagcgactcatcaacaacaactggggattccggcccaagagactcagcttcaagctcttcaacatccaggtcaaggaggtcacgcagaatgaaggcaccaagaccatcgccaataacctcaccagcaccatccaggtgtttacggactcggagtaccagctgccgtacgttctcggctctgcccaccagggctgcctgcctccgttcccggcggacgtgttcatgattccccagtacggctacctaacactcaacaacggtagtcaggccgtgggacgctcctccttctactgcctggaatactttccttcgcagatgctgagaaccggcaacaacttccagtttacttacaccttcgaggacgtgcctttccacagcagctacgcccacagccagagcttggaccggctgatgaatcctctgattgaccagtacctgtactacttgtctcggactcaaacaacaggaggcacggcaaatacgcagactctgggcttcagccaaggtgggcctaatacaatggccaatcaggcaaagaactggctgccaggaccctgttaccgccaacaacgcgtctcaacgacaaccgggcaaaacaacaatagcaactttgcctggactgctgggaccaaataccatctgaatggaagaaattcattggctaatcctggcatcgctatggcaacacacaaggacgacgaggagcgtttttttcccagtaacgggatcctgatttttggcaaacaaaatgctgccagagacaatgcggattacagcgatgtcatgctcaccagcgaggaagaaatcaaaaccactaaccctgtggctacagaggaatacggtatcgtggcagataacttgcagcagcaaaacacggctcctcaaattggaactgtcaacagccagggggccttacccggtatggtctggcagaaccgggacgtgtacctgcagggtcccatctgggccaagattcctcacacggacggcaacttccacccgtctccgctgatgggcggctttggcctgaaacatcctccgcctcagatcctgatcaagaacacgcctgtacctgcggatcctccgaccaccttcaaccagtcaaagctgaactctttcatcacgcaatacagcaccggacaggtcagcgtggaaatcgagtgggagctgcagaaagaaaacagcaagcgctggaaccccgagatccagtacacctccaactactacaaatctacaaatgtggactttgctgtcaacacggagggggtttatagcgagcctcgccccattggcacccgttacctcacccgcaacctgtaa

SEQ ID NO: 1524 - DNA, 2211 bp, Artificial Sequence
  Description of Artificial Sequence: Synthetic polynucleotide
  misc_feature (715)..(715): n is a, c, g, or t
atggctgccgatggttatcttccagattggctcgaggacaacctctctgagggcattcgcgagtggtgggcgctgaaacctggagccccgaagcccaaagccaaccagcaaaagcaggacgacggccggggtctggtgcttcctggctacaagtacctcggacccttcaacggactcgacaagggggagcccgtcaacgcggcggacgcagcggccctcgagcacgacaaggcctacgaccagcagctcaaagcgggtgacaatccgtacctgcggtataaccacgccgacgccgagtttcaggagcgtctgcaagaagatacgtcttttgggggcaacctcgggcgagcagtcttccaggccaagaagcgggttctcgaacctctcggtctggttgaggaaggcgctaagacggctcctggaaagaaacgtccggtagagcagtcgccacaagagccagactcctcctcgggcatcggcaagacaggccagcagcccgctaaaaagaggctcaattttggtcagactggcgactcagagtcagtccccgacccacaacctctcggagaacctccagcaacccccgctgctgtgggacctactacaatggcttcaggcggtggcgcaccaatggcagacaataacgaaggcgccgacggagtgggtaatgcctcaggaaattggcattgcgattccacatggctgggcgacagantcatcaccaccagcacccgaacatgggccttgcccacctataacaaccacctctacaagcaaatctccagtgcttcaacgggggccagcaacgacaaccactacttcggctacagcaccccctgggggtattttgatttcaacagattccactgccatttctcaccacgtgactggcagcgactcatcaacaacaattggggattccggcccaagagactcaacttcaagctcttcaacatccaagtcaaggaggtcacgcagaatgaaggcaccaagaccatcgccaataacctcaccagcaccatccaggtgtttacggactcggagtaccagctgccgtacgttctcggctctgcccaccagggctgcctgcctccgttcccggcggacgtgttcatgattccccagtacggctacctaacactcaacaacggtagtcaggccgtgggacgctcctccttctactgcctggaatattttccatctcaaatgctgcgaactggaaacaattttgaattcagctacaccttcgaggacgtgcctttccacagcagctacgcacacagccagagcttggaccgactgatgaatcctctcatcgaccagtacctgtactacttgtctcggactcaaacaacaggaggcacggcaaatacgcagactctgggcttcagccaaggtgggcctaatacaatggccaatcaggcaaagaactggctgccaggaccctgttaccgccaacaacgcgtctcaacgacaaccgggcaaaacaacaatagcaactttgcctggactgctgggaccaaataccatctgaatggaagaaattcattggctaatcctggcatcgctatggcaacacacaaagacgacgaggagcgtttttttcccagtaacgggatcctgatttttggcaaacaaaatgctgccagagacaatgcggattacagcgatgtcatgctcaccagcgaggaagaaatcaaaaccactaaccctgtggctacagaggaatacggtatcgtggcagataacttgcagcagcaaaacacggctcctcaaattggaactgtcaacagccaggggaccttacccggtatggtctggcagaaccgggacgtgtacctgcagggtcccatctgggccaagattcctcacacggacggcaacttccacccgtctccgctgatgggcggctttggcctgaaacatcctccgcctcagatcctgatcaagaacacgcctgtacctgcggatcctccgaccaccttcaaccagtcaaagctgaactctttcatcacgcaatacagcaccggacaggtcagcgtggaaattgaatgggagctacagaaggaaaacagcaagcgctggaaccccgagatccagtacacctccaattactacaaatctacaagtgtggactttgctgttaatacagaaggcgtgtactctgaaccccgccccattggcacgcgtttcctcacccgtaatctgtaa

SEQ ID NO: 1525 - DNA, 2214 bp, Artificial Sequence
  Description of Artificial Sequence: Synthetic polynucleotide
atggctgccgatggttatcttccagattggctcgaggacaacctctctgagggcattcgcgagtggtgggcgctgaaacctggagccccgaagcccaaagccaaccagcaaaagcaggacgacggccggggtctggtgcttcctggctacaagtacctcggacccttcaacggactcgacaagggggagcccgtcaacgcggcggacgcagcggccctcgagcacgacaaggcctacgaccagcagctcaaagcgggtgacaatccgtacctgcggtataaccacgccgacgccgagtttcaggagcgtctgcaagaagatacgtcttttgggggcaacctcgggcgagcagtcttccaggccaagaagcgggttctcgaacctctcggtctggttgaggaaggcgctaagacggctcctggaaagaaacgtccggtagagcagtcgccacaagagccagactcctcctcgggcatcggcaagacaggccagcagcccgctaaaaagaggctcaattttggccagactggcgactcagagtcagttccagaccctcaacctctcggagaacctccagcagcgccctctggtgtgggacctaatacaatggctgcaggcggtggcgcaccaatggcagacaataacgaaggcgccgacggagtgggtagttcctcgggaaattggcattgcgattccacatggctgggcgacagagtcatcaccaccagcacccgaacctgggccctgcccacctacaacaaccacctctacaagcaaatctccaacgggacatcgggaggagccaccaacgacaacacctacttcggctacagcaccccctgggggtattttgactttaacagattccactgccacttttcaccacgtgactggcagcgactcatcaacaacaactggggattccggcccaagagactcagcttcaagctcttcaacatccaggtcaaggaggtcacgcagaatgaaggcaccaagaccatcgccaataacctcaccagcaccatccaggtgtttacggactcggagtaccagctgccgtacgtactaggatccgctcaccagggatgtctgcctccgttcccggcggacgtgttcatgattccccagtacggctacctaacactcaacaacggtagtcaggccgtgggacgctcctccttctactgcctggaatattttccatctcagatgctgagaacgggcaataactttaccttcagctacaccttcgaggacgtgcctttccacagcagctatgcccacagccagagcttggaccggctgatgaatcctctgattgaccagtacctgtactacttgtctcggactcaaacaacaggaggcacggcaaatacgcagactctgggcttcagccaaggtgggcctaatacaatggccaatcaggcaaagaactggctgccaggaccctgttaccgccaacaacgcgtctcaacgacaaccgggcaaaacaacaatagcaactttgcctggactgctgggaccaaataccatctgaatggaagaaattcattggctaatcctggcatcgctatggcaacacacaaagacgacgaggagcgtttttttcccagtaacgggatcctgatttttggcaaacaaaatgctgccagagacaatgcggattacagcgatgtcatgctcaccagcgaggaagaaatcaaaaccactaaccctgtggctacagaggaatacggtatcgtggcagataacttgcagcagcaaaacacggctcctcaaattggaactgtcaacagccagggggccttacccggtatggtctggcagaaccgggacgtgtacctgcagggtcccatctgggccaagattcctcacacggacggcaacttccacccgtctccgctaatgggaggatttggactgaagcacccacctcctcagatcctgatcaagaacacgccggtacctgcggatcctccgaccaccttcaaccagtcaaagctgtactctttcatcacgcaatacagcaccggacaggtcagcgtggaaattgaatgggagctgcagaaggaaaacagcaagcgctggaaccccgagatccaatacacctccaactactacaaatctacaagtgtggactttgctgttaatacagaaggcgtgtactctgaaccccgccccattggcacccgttacctcacccgtaatctgtaa

SEQ ID NO: 1526 - protein, 737 aa, Artificial Sequence
  Description of Artificial Sequence: Synthetic polypeptide
MAADGYLPDWLEDNLSEGIREWWDLKPGAPKPKANQQKQDDGRGLVLPGYKYLGPFNGLDKGEPVNAADAAALEHDKAYDQQLKAGDNPYLRYNHADVEFQERLQEDTSFGGNLGRAVFQAKKRVLEPFGLVEEGAKTAPGKKRPVEQSPQEPDSSSGIGKKGQQPARKRLNFGQTGDSESVPDPQPLGEPPAAPSGVGPNTMAAGGGAPMADNNEGADGVGNSSGNWHCDSTWMGDRVITTSTRTWALPTYNNHLYKQISNGTSGGSTNDNTYFGYSTPWGYFDFNRFHCHFSPRDWQRLINNNWGFRPKRLSFKLFNIQVKEVTQNEGTKTIANNLTSTIQVFTDSEYQLPYVLGSAHQGCLPPFPADVFMIPQYGYLTLNNGSQAVGRSSFYCLEYFPSQMLRTGNNFEFSYQFEDVPFHSSYAHSQSLDRLMNPLIDQYLYYLSRTQSTGGTARTQQLLFSQAGPNTMANQAKNWLPGPCYRQQRVSTTTGQNNNSNSAWTAGTKYHLNGRNSLANPGIAMATHKDDEERFFPSNGILIFGKQNAARDNADYSDVMLTSEEEIKTTNPVATEEYGIVADNLQQQNTAPQIGTVNSQGALPGMVWQNRDVYLQGPIWAKIPHTDGNFHPSPLMGGFGLKHPPPQILIKNTPVPADPPTTFNQSKLNSFITQYSTGQVSVEIEWELQKENSKRWNPEIQYTSNYYKSTSVDFAVNTEGVYSEPRPIGTRYLTRNL

SEQ ID NO: 1527 - protein, 737 aa, Artificial Sequence
  Description of Artificial Sequence: Synthetic polypeptide
MAADGYLPDWLEDNLSEGIREWWALKPGAPKPKANQQKQDDGRGLVLPGYKYLGPFNGLDKGEPVNAADAAALEHDKAYDQQLKAGDNPYLRYNHADAEFQERLQEDTSFGGNLGRAVFQAKKRVLEPLGLVEDGAKTAPGKKRPVEQSPQEPDSSSGIGKKGQQPARKRLNFGQTGDSESVPDPQPLGEPPATPAAVGPTTMASGGGAPMADNNEGADGVGSSSGNWHCDSTWLGDRVITTSTRTWALPTYNNHLYKQISNGTSGGATNDNTYFGYSTPWGYFDFNRFHCHFSPRDWQRLINNNWGFRPKRLSFKLFNIQVKEVTQNEGTKTIANNLTSTIQVFTDSEYQLPYVLGSAHQGCLPPFPADVFMIPQYGYLTLNNGSQAVGRSSFYCLEYFPSQMLRTGNNFQFTYTFEDVPFHSSYAHSQSLDRLMNPLIDQYLYYLSRTQTTGGTANTQTLGFSQGGPNTMANQAKNWLPGPCYRQQRVSTTTGQNNNSNFAWTAGTKYHLNGRNSLANPGIAMATHKDDEERFFPSNGILIFGKQNAARDNADYSDVMLTSEEEIKTTNPVATEEYGIVADNLQQQNTAPQIGTVNSQGALPGMVWQNRDVYLQGPIWAKIPHTDGNFHPSPLMGGFGLKHPPPQILIKNTPVPADPPTTFNQSKLNSFITQYSTGQVSVEIEWELQKENSKRWNPEIQYTSNYYKSTNVDFAVNTEGVYSEPRPIGTRYLTRNL

SEQ ID NO: 1528 - protein, 736 aa, Artificial Sequence
  Description of Artificial Sequence: Synthetic polypeptide
  misc_feature (239)..(239): Xaa can be any naturally occurring amino acid
MAADGYLPDWLEDNLSEGIREWWALKPGAPKPKANQQKQDDGRGLVLPGYKYLGPFNGLDKGEPVNAADAAALEHDKAYDQQLKAGDNPYLRYNHADAEFQERLQEDTSFGGNLGRAVFQAKKRVLEPLGLVEEGAKTAPGKKRPVEQSPQEPDSSSGIGKTGQQPAKKRLNFGQTGDSESVPDPQPLGEPPATPAAVGPTTMASGGGAPMADNNEGADGVGNASGNWHCDSTWLGDRXITTSTRTWALPTYNNHLYKQISSASTGASNDNHYFGYSTPWGYFDFNRFHCHFSPRDWQRLINNNWGFRPKRLNFKLFNIQVKEVTQNEGTKTIANNLTSTIQVFTDSEYQLPYVLGSAHQGCLPPFPADVFMIPQYGYLTLNNGSQAVGRSSFYCLEYFPSQMLRTGNNFEFSYTFEDVPFHSSYAHSQSLDRLMNPLIDQYLYYLSRTQTTGGTANTQTLGFSQGGPNTMANQAKNWLPGPCYRQQRVSTTTGQNNNSNFAWTAGTKYHLNGRNSLANPGIAMATHKDDEERFFPSNGILIFGKQNAARDNADYSDVMLTSEEEIKTTNPVATEEYGIVADNLQQQNTAPQIGTVNSQGTLPGMVWQNRDVYLQGPIWAKIPHTDGNFHPSPLMGGFGLKHPPPQILIKNTPVPADPPTTFNQSKLNSFITQYSTGQVSVEIEWELQKENSKRWNPEIQYTSNYYKSTSVDFAVNTEGVYSEPRPIGTRFLTRNL

SEQ ID NO: 1529 - protein, 737 aa, Artificial Sequence
  Description of Artificial Sequence: Synthetic polypeptide
MAADGYLPDWLEDNLSEGIREWWALKPGAPKPKANQQKQDDGRGLVLPGYKYLGPFNGLDKGEPVNAADAAALEHDKAYDQQLKAGDNPYLRYNHADAEFQERLQEDTSFGGNLGRAVFQAKKRVLEPLGLVEEGAKTAPGKKRPVEQSPQEPDSSSGIGKTGQQPAKKRLNFGQTGDSESVPDPQPLGEPPAAPSGVGPNTMAAGGGAPMADNNEGADGVGSSSGNWHCDSTWLGDRVITTSTRTWALPTYNNHLYKQISNGTSGGATNDNTYFGYSTPWGYFDFNRFHCHFSPRDWQRLINNNWGFRPKRLSFKLFNIQVKEVTQNEGTKTIANNLTSTIQVFTDSEYQLPYVLGSAHQGCLPPFPADVFMIPQYGYLTLNNGSQAVGRSSFYCLEYFPSQMLRTGNNFTFSYTFEDVPFHSSYAHSQSLDRLMNPLIDQYLYYLSRTQTTGGTANTQTLGFSQGGPNTMANQAKNWLPGPCYRQQRVSTTTGQNNNSNFAWTAGTKYHLNGRNSLANPGIAMATHKDDEERFFPSNGILIFGKQNAARDNADYSDVMLTSEEEIKTTNPVATEEYGIVADNLQQQNTAPQIGTVNSQGALPGMVWQNRDVYLQGPIWAKIPHTDGNFHPSPLMGGFGLKHPPPQILIKNTPVPADPPTTFNQSKLYSFITQYSTGQVSVEIEWELQKENSKRWNPEIQYTSNYYKSTSVDFAVNTEGVYSEPRPIGTRYLTRNL

SEQ ID NO: 1530 - DNA, 2208 bp, Artificial Sequence
  Description of Artificial Sequence: Synthetic polynucleotide
atggctgccgatggttatcttccagattggctcgaggacaacctctctgagggcattcgcgagtggtgggacttgaaacctggagccccgaaacccaaagccaaccagcaaaagcaggacgacggccggggtctggtgcttcctggctacaagtacctcggacccttcaacggactcgacaagggggagcccgtcaacgcggcggatgcagcggccctcgagcacgacaaagcctacgaccggcagctcgacagcggagacaacccgtacctcaagtacaaccacgccgacgcggagtttcaggagcgccttaaagaagatacgtcttttgggggcaacctcggacgagcagtcttccaggccaagaagagggttctcgaaccttttggtctggttgaggaaggtgctaagacggctcctggaaagaaacgtccggtagagcagtcgccacaagagccagactcctcctcgggcattggcaagacaggccagcagcccgctaaaaagagactcaattttggtcagactggcgactcagagtcagtccccgacccacaacctctcggagaacctccagcaacccccgctgctgtgggacctactacaatggcttcaggtggtggcgcaccagtggcagacaataacgaaggcgccgacggagtgggtagttcctcgggaaattggcattgcgattccacatggctgggcgacagagtcatcaccaccagcacccgaacatgggccttgcccacctataacaaccacctctacaagcaaatctccagtgcttcgacgggggccagcaacgacaaccactacttcggctacagcaccccctgggggtattttgatttcaacaggttccactgccatttctcaccacgtgactggcagcgactcatcaacaacaattggggattccggcccaaaagactcaacttcaagctgttcaacatccaggtcaaggaagtcacgacgaacgaaggcaccaagaccatcgccaataatctcaccagcaccgtgcaggtctttacggactcggagtaccagttaccgtacgtgctaggatccgctcaccagggatgtctgcctccgttcccggcggacgtcttcatggttcctcagtacggctatttaactttaaacaatggaagccaagccctgggacgttcctccttctactgtctggagtatttcccatcgcagatgctgagaacgggcaacaactttacctttagctacaccttcgaggacgtgcctttccacagcagctacgcgcacagccagagcctggacaggctgatgaatcccctcatcgaccagtacctgtactacctggtcagaacgcaaacgactggaactggagggacgcagactctggcattcagccaagcgggtcctagctcaatggccaaccaggctagaaattgggtgcccggaccttgctaccggcagcagcgcgtctccacgacaaccaaccagaacaacaacagcaactttgcctggacgggagctgccaagtttaagctgaacggccgagactctctaatgaatccgggcgtggcaatggcttcccacaaggatgacgacgaccgcttcttcccttcgagcggggtcctgatttttggcaagcaaggagccgggaacgatggagtggattacagccaagtgctgattacagatgaggaagaaatcaaggctaccaaccccgtggccacagaagaatatggagcagtggccatcaacaaccaggccgccaatacgcaggcgcagaccggactcgtgcacaaccagggggtgattcccggcatggtgtggcagaatagagacgtgtacctgcagggtcccatctgggccaaaattcctcacacggacggcaactttcacccgtctcccctgatgggcggctttggactgaagcacccgcctcctcaaattctcatcaagaacacaccggttccagcggacccgccgcttaccttcaaccaggccaagctgaactctttcatcacgcagtacagcaccggacaggtcagcgtggaaatcgagtgggagctgcagaaagaaaacagcaaacgctggaatccagagattcaatacacttccaactactacaaatctacaaatgtggactttgctgtcaacacggagggggtttatagcgagcctcgccccattggcacccgttacctcacccgcaacctgtaa

SEQ ID NO: 1531 - DNA, 2211 bp, Artificial Sequence
  Description of Artificial Sequence: Synthetic polynucleotide
  misc_feature (337)..(337): n is a, c, g, or t
atggctgccgatggttatcttccagattggctcgaggacactctctctgaaggaataagacagtggtggaagctcaaacctggcccaccaccaccaaagcccgcagagcggcataaggacgacagcaggggtcttgtgcttcctggctacaagtacctcggacccttcaacggactcgacaagggggagcccgtcaacgcggcggacgcagcgaccctcgagcacgacaaggcctacgaccagcagctcaaagcgggtgacaatccgtacctgcggtataaccacgccgacgccgagtttcaggagcgtctgcaagaagatacgtcttttgggggcnacctcgggcgagcagtcttccaggccaagaagcgggttctcgaacctctcggtctggttgaggaagctgctaagacggctcctggaaagaagagaccagtagagccatcaccccagcgttctccagactcctctacgggcatcggcaagaaaggccaacagcccgccagaaaaagactcaattttggtcagactggcgactcagagtcagttccagaccctcaacctctcggagaacctccagcagcgccctctggtgtgggacctaatacaatggctgcaggcggtggcgcaccaatggcagacaataacgaaggcgccgacggagtgggtagttcctcgggaaattggcattgcgattccacatggctgggcgacagagtcatcaccaccagcacccgaacctgggccctgcccacctacaacaaccacctctacaagcaaatctccagtgcttcaacgggggccagcaacgacaaccactacttcggctacagcaccccctgggggtattttgatttcaacagattccactgccatttctcaccacgtgactggcagcgactcatcaacaacaattggggattccggcccaagagactcaacttcaagctcttcaacatccaagtcaaggaggtcacgacgaatgatggcgtcacgaccatcgctaataaccttaccagcacggttcaagtcttctcggactcagactatcagctcccgtacgtgctcgggtcggctcacgagggctgcctcccgccgttcccagcggacgttttcatgattcctcagtacggctatttaactttaaacaatggaagccaagccctgggacgttcctccttctactgtctggagtatttcccatcgcagatgctgagaaccggcaacaactttcagttcagctacaccttcgaggacgtgcctttccacagcagctacgcgcacagccagagcctggacaggctgatgaatcccctcatcgaccagtacctgtactacctggtcagaacgcaaacgactggaactggagggacgcagactctggcattcagccaagcgggtcctagctcaatggccaaccaggctagaaattgggtgcccggaccttgctaccggcagcagcgcgtctccacgacaaccaaccagaacaacaacagcaactttgcctggacgggagctgccaagtttaagctgaacggccgagactctctaatgaatccgggcgtggcaatggcttcccacaaggatgacgacgaccgcttcttcccttcgagcggggtcctgatttttggcaagcaaggagccgggaacgatggagtggattacagccaagtgctgattacagatgaggaagaaatcaaggctaccaaccccgtagccacagaagaatatggagcagtggccatcaacaaccaggccgccaatacgcaggcgcagaccggactcgtgcacaaccagggggtgattcccggaatggtgtggcaagacagagacgtatacctgcagggtcctatttgggccaaaattcctcacacggatggacactttcacccgtctcctctcatgggcggctttggacttaagcacccgcctcctcagatcctcatcaaaaacacgcctgttcctgcgaatcctccggcagagttttcggctacaaagtttgcttcattcatcacccagtattccacaggacaagtgagcgtggagattgaatgggagctgcagaaagaaaacagcaaacgctggaatcccgaagtgcagtatacatctaactatgcaaaatctgccaacgttgatttcactgtggacaacaatggactttatactgagcctcgccccattggcacccgttacctcacccgtcccctgtaa

SEQ ID NO: 1532 - DNA, 2214 bp, Artificial Sequence
  Description of Artificial Sequence: Synthetic polynucleotide
  misc_feature (335)..(335): n is a, c, g, or t
atgactgacggttaccttccagattggctagaggacaacctctctgaaggcgttcgagagtggtgggcgctgcaacctggagccccgaagcccaaagccaaccagcaaaagcaggacgacggccggggtctggtgcttcctggctacaagtacctcggacccttcaacggactcgacaagggggagcccgtcaacgcggcggacgcagcggccctcgagcacgacaaggcctacgaccagcagctcaaagcgggtgacaatccgtacctgcggtataaccacgccgacgccgagtttcaggagcgtctgcaagaagatacgtcttttgggggcancctcgggcgagcagtcttccaggccaagaagcgggttctcgaacctctcggtctggttgaggaaggcgctaagacggctcctggaaagaaacgtccggtagagccatcaccccagcgttctccagactcctctacgggcatcggcaagaaaggccaacagcccgccagaaaaagactcaattttggtcagactggcgactcagagtcagttccagaccctcaacctctcggagaacctccagcagcgccctcaggtgtgggatctcttacaatggcttcaggtggtggcgcaccagtggcagacaataacgaaggtgccgatggagtgggtagttcctcgggaaattggcattgcgattcccaatggctgggggacagagtcatcaccaccagcacccgaacctgggccctgcccacctacaacaatcacctctacaagcaaatctccaacagcacatctggaggatcttcaaatgacaacgcctacttcggctacagcaccccctgggggtattttgacttcaacagattccactgccacttctcaccacgtgactggcagcgactcatcaacaacaactggggattccggcccaagagactcagcttcaagctcttcaacatccaggtcaaggaggtcacgcagaatgaaggcaccaagaccatcgccaataacctcaccagcaccatccaggtgtttacggactcggagtaccagctgccgtacgttctcggctctgcccaccagggctgcctgcctccgttcccggcggacgtgttcatgattccccagtacggctacctaacactcaacaacggtagtcaggccgtgggacgctcctccttctactgcctggaatactttccttcgcagatgctgagaaccggcaacaacttccagtttacttacaccttcgaggacgtgcctttccacagcagctacgcccacagccagagcttggaccggctgatgaatcctctgattgaccagtacctgtactacttgtctcggactcaaacaacaggaggcacggcaaatacgcagactctgggcttcagccaaggtgggcctaatacaatggccaatcaggcaaagaactggctgccaggaccctgttaccgccaacaacgcgtctcaacgacaaccgggcaaaacaacaatagcaactttgcctggactgctgggaccaaataccatctgaatggaagaaattcattggctaatcctggcatcgctatggcaacacacaaagacgacgaggagcgtttttttcccagtaacgggatcctgatttttggcaaacaaaatgctgccagagacaatgcggattacagcgatgtcatgctcaccagcgaggaagaaatcaaaaccactaaccctgtggctacagaggaatacggtatcgtggcagataacttgcagcagcaaaacacggctcctcaaattggaactgtcaacagccagggggccttacccggtatggtctggcagaaccgggacgtgtacctgcagggtcccatctgggccaagattcctcacacggacggcaacttccacccgtctccgctgatgggcggctttggcctgaaacatcctccgcctcagatcctgatcaagaacacgcctgtacctgcggatcctccgaccaccttaaaccaggccaagctgaactctttcatcacgcaatacagcaccggacaggtcagcgtggaaattgaatgggagctgcagaaggaaaacagcaagcgctggaacccagagattcagtacacttcaaactactacaaatctacaaatgtggactttgctgtcaatacagagggaacttatagtgaaccccgccccattggcaccagatttctgactcgtaatctgtaa

SEQ ID NO: 1533 - DNA, 2211 bp, Artificial Sequence
  Description of Artificial Sequence: Synthetic polynucleotide
  misc_feature (338)..(338): n is a, c, g, or t
atggctgccgatggttatcttccagattggctcgaggacactctctctgaaggaataagacagtggtggaagctcaaacctggcccaccaccaccaaagcccgcagagcggcataaggacgacagcaggggtcttgtgcttcctgggtacaagtacctcggccccttcaacggactcgacaagggggagcccgtcaacgcggcggacgcagcggccctcgagcacgacaaggcctacgaccagcagctcgaagcgggtgacaatccgtacctgcggtataaccacgccgacgccgagtttcaggagcgtctgcaagaagatacgtcttttgggggcancctcgggcgagcagtcttccaggccaagaagcgggttctcgaacctctcggtctggttgaggaaggcgctaagacggctcctggaaagaagagaccagtagagcagtcaccccaagaaccagactcctcctcgggcatcggcaggaaaggccaacagcccgccagaaaaagactcaattttggccagactggcgactcagagtcagttccagaccctcaacctctcggagaacctccagcagcgccctctggtgtgggacctaatacaatggcttcaggcggtggcgctccaatggcagacaataacgaaggcgccgacggagtgggtaatgcctcaggaaattggcattgcgattccacatggctgggcgacagagtcatcaccaccagcacccgcacctgggccttgcccacctacaataaccacctctacaagcaaatctccagtgcttcaacgggggccagcaacgacaaccactacttcggctacagcaccccctgggggtattttgatttcaacagattccactgccacttttcaccacgtgactggcagcgactcatcaacaacaattggggattccggcccaagagactcaacttcaaactcttcaacatccaggtcaaggaggtcacgcagaatgaaggcactaagaccatcgccaataaccttaccagcacgattcaggtatttacggactcggaataccagctgccgtacgtcctcggctccgcgcaccagggctgcctgcctccgttcccggcggacgtcttcatgattccccagtacggctaccttacactgaacaatggaagtcaagccgtaggccgttcctccttctactgcctggaatattttccatctcaaatgctgcgaactggcaacaacttccagtttacctacaccttcgaggacgtgcctttccacagcagctacgcccacagccagagcttggaccggctgatgaatcctctgattgaccagtacctgtactacttgtctcggactcagtccacaggaggaactcaaggtacccagcaattgttattttctcaagctgggcctgcaaacatgtcggctcaggctaagaactggctacctggaccttgctaccggcagcagcgagtctctacgacactgtcgcaaaacaacaacagcaactttgcttggactggtgccaccaaatatcacctgaacggaagagactctttggtaaatcccggtgtcgccatggcaacccacaaggacgacgaggaacgcttcttcccgtcgagtggagtcctgatgtttggaaaacagggtgctggaagagacaatgtggactacagcagcgttatgctaaccagcgaagaagaaattaaaaccactaaccctgtagccacagaacaatacggtgtggtggttgataacttgcagcaaaccaatacggggcctattgtgggaaatgtcaacagccaaggagccttacctggtatggtctggcagaaccgggacgtgtacctgcagggtcccatctgggccaagattcctcacacggacggcaacttccacccgtctccgctgatgggcggctttggcctgaaacatcctccgcctcagatcctcatcaaaaacacacctgtacctgcggatcctccaacggccttcaacaaggacaagctgaactctttcatcacccagtattctactggccaagtcagcgtggagatcgagtgggagctgcagaaggaaaacagcaagcgctggaacccggagatccagtacacttccaactattacaagtctaataatgttgaatttgctgttaatactgaaggtgtatatagtgaaccccgccccattggcaccagatacctgactcgtaatctgtaa

SEQ ID NO: 1534 - protein, 735 aa, Artificial Sequence
  Description of Artificial Sequence: Synthetic polypeptide
MAADGYLPDWLEDNLSEGIREWWDLKPGAPKPKANQQKQDDGRGLVLPGYKYLGPFNGLDKGEPVNAADAAALEHDKAYDRQLDSGDNPYLKYNHADAEFQERLKEDTSFGGNLGRAVFQAKKRVLEPFGLVEEGAKTAPGKKRPVEQSPQEPDSSSGIGKTGQQPAKKRLNFGQTGDSESVPDPQPLGEPPATPAAVGPTTMASGGGAPVADNNEGADGVGSSSGNWHCDSTWLGDRVITTSTRTWALPTYNNHLYKQISSASTGASNDNHYFGYSTPWGYFDFNRFHCHFSPRDWQRLINNNWGFRPKRLNFKLFNIQVKEVTTNEGTKTIANNLTSTVQVFTDSEYQLPYVLGSAHQGCLPPFPADVFMVPQYGYLTLNNGSQALGRSSFYCLEYFPSQMLRTGNNFTFSYTFEDVPFHSSYAHSQSLDRLMNPLIDQYLYYLVRTQTTGTGGTQTLAFSQAGPSSMANQARNWVPGPCYRQQRVSTTTNQNNNSNFAWTGAAKFKLNGRDSLMNPGVAMASHKDDDDRFFPSSGVLIFGKQGAGNDGVDYSQVLITDEEEIKATNPVATEEYGAVAINNQAANTQAQTGLVHNQGVIPGMVWQNRDVYLQGPIWAKIPHTDGNFHPSPLMGGFGLKHPPPQILIKNTPVPADPPLTFNQAKLNSFITQYSTGQVSVEIEWELQKENSKRWNPEIQYTSNYYKSTNVDFAVNTEGVYSEPRPIGTRYLTRNL

SEQ ID NO: 1535 - protein, 736 aa, Artificial Sequence
  Description of Artificial Sequence: Synthetic polypeptide
  misc_feature (113)..(113): Xaa can be any naturally occurring amino acid
MAADGYLPDWLEDTLSEGIRQWWKLKPGPPPPKPAERHKDDSRGLVLPGYKYLGPFNGLDKGEPVNAADAATLEHDKAYDQQLKAGDNPYLRYNHADAEFQERLQEDTSFGGXLGRAVFQAKKRVLEPLGLVEEAAKTAPGKKRPVEPSPQRSPDSSTGIGKKGQQPARKRLNFGQTGDSESVPDPQPLGEPPAAPSGVGPNTMAAGGGAPMADNNEGADGVGSSSGNWHCDSTWLGDRVITTSTRTWALPTYNNHLYKQISSASTGASNDNHYFGYSTPWGYFDFNRFHCHFSPRDWQRLINNNWGFRPKRLNFKLFNIQVKEVTTNDGVTTIANNLTSTVQVFSDSDYQLPYVLGSAHEGCLPPFPADVFMIPQYGYLTLNNGSQALGRSSFYCLEYFPSQMLRTGNNFQFSYTFEDVPFHSSYAHSQSLDRLMNPLIDQYLYYLVRTQTTGTGGTQTLAFSQAGPSSMANQARNWVPGPCYRQQRVSTTTNQNNNSNFAWTGAAKFKLNGRDSLMNPGVAMASHKDDDDRFFPSSGVLIFGKQGAGNDGVDYSQVLITDEEEIKATNPVATEEYGAVAINNQAANTQAQTGLVHNQGVIPGMVWQDRDVYLQGPIWAKIPHTDGHFHPSPLMGGFGLKHPPPQILIKNTPVPANPPAEFSATKFASFITQYSTGQVSVEIEWELQKENSKRWNPEVQYTSNYAKSANVDFTVDNNGLYTEPRPIGTRYLTRPL

SEQ ID NO: 1536 - protein, 737 aa, Artificial Sequence
  Description of Artificial Sequence: Synthetic polypeptide
  misc_feature (112)..(112): Xaa can be any naturally occurring amino acid
MTDGYLPDWLEDNLSEGVREWWALQPGAPKPKANQQKQDDGRGLVLPGYKYLGPFNGLDKGEPVNAADAAALEHDKAYDQQLKAGDNPYLRYNHADAEFQERLQEDTSFGGXLGRAVFQAKKRVLEPLGLVEEGAKTAPGKKRPVEPSPQRSPDSSTGIGKKGQQPARKRLNFGQTGDSESVPDPQPLGEPPAAPSGVGSLTMASGGGAPVADNNEGADGVGSSSGNWHCDSQWLGDRVITTSTRTWALPTYNNHLYKQISNSTSGGSSNDNAYFGYSTPWGYFDFNRFHCHFSPRDWQRLINNNWGFRPKRLSFKLFNIQVKEVTQNEGTKTIANNLTSTIQVFTDSEYQLPYVLGSAHQGCLPPFPADVFMIPQYGYLTLNNGSQAVGRSSFYCLEYFPSQMLRTGNNFQFTYTFEDVPFHSSYAHSQSLDRLMNPLIDQYLYYLSRTQTTGGTANTQTLGFSQGGPNTMANQAKNWLPGPCYRQQRVSTTTGQNNNSNFAWTAGTKYHLNGRNSLANPGIAMATHKDDEERFFPSNGILIFGKQNAARDNADYSDVMLTSEEEIKTTNPVATEEYGIVADNLQQQNTAPQIGTVNSQGALPGMVWQNRDVYLQGPIWAKIPHTDGNFHPSPLMGGFGLKHPPPQILIKNTPVPADPPTTLNQAKLNSFITQYSTGQVSVEIEWELQKENSKRWNPEIQYTSNYYKSTNVDFAVNTEGTYSEPRPIGTRFLTRNL

SEQ ID NO: 1537 - protein, 736 aa, Artificial Sequence
  Description of Artificial Sequence: Synthetic polypeptide
  misc_feature (113)..(113): Xaa can be any naturally occurring amino acid
MAADGYLPDWLEDTLSEGIRQWWKLKPGPPPPKPAERHKDDSRGLVLPGYKYLGPFNGLDKGEPVNAADAAALEHDKAYDQQLEAGDNPYLRYNHADAEFQERLQEDTSFGGXLGRAVFQAKKRVLEPLGLVEEGAKTAPGKKRPVEQSPQEPDSSSGIGRKGQQPARKRLNFGQTGDSESVPDPQPLGEPPAAPSGVGPNTMASGGGAPMADNNEGADGVGNASGNWHCDSTWLGDRVITTSTRTWALPTYNNHLYKQISSASTGASNDNHYFGYSTPWGYFDFNRFHCHFSPRDWQRLINNNWGFRPKRLNFKLFNIQVKEVTQNEGTKTIANNLTSTIQVFTDSEYQLPYVLGSAHQGCLPPFPADVFMIPQYGYLTLNNGSQAVGRSSFYCLEYFPSQMLRTGNNFQFTYTFEDVPFHSSYAHSQSLDRLMNPLIDQYLYYLSRTQSTGGTQGTQQLLFSQAGPANMSAQAKNWLPGPCYRQQRVSTTLSQNNNSNFAWTGATKYHLNGRDSLVNPGVAMATHKDDEERFFPSSGVLMFGKQGAGRDNVDYSSVMLTSEEEIKTTNPVATEQYGVVVDNLQQTNTGPIVGNVNSQGALPGMVWQNRDVYLQGPIWAKIPHTDGNFHPSPLMGGFGLKHPPPQILIKNTPVPADPPTAFNKDKLNSFITQYSTGQVSVEIEWELQKENSKRWNPEIQYTSNYYKSNNVEFAVNTEGVYSEPRPIGTRYLTRNL

SEQ ID NO: 1538 - DNA, 2211 bp, Artificial Sequence
  Description of Artificial Sequence: Synthetic polynucleotide
atggccgccgacggctacctgcccgactggctggaggacaacctgagcgagggcatccgcgagtggtgggccctgaagcccggcgccccccagcccaaggccaaccagcagcaccaggacaacgcccgcggcctggtgctgcccggctacaagtacctgggccccggcaacggcctggacaagggcgagcccgtgaacgccgccgacgccgccgccctggagcacgacaaggcctacgaccagcagctgaaggccggcgacaacccctacctgaagtacaaccacgccgacgccgagttccaggagcgcctgaaggaggacaccagcttcggcggcaacctgggccgcgccgtgttccaggccaagaagcgcctgctggagcccctgggcctggtggaggaggccgccaagaccgcccccggcaagaagcgccccgtggagcagagcccccaggagcccgacagcagcgccggcatcggcaagagcggcgcccagcccgccaagaagcgcctgaacttcggccagaccggcgacaccgagagcgtgcccgacccccagcccatcggcgagccccccgccgcccccagcggcgtgggcagcctgaccatggccagcggcggcggcgcccccgtggccgacaacaacgagggcgccgacggcgtgggcagcagcagcggcaactggcactgcgacagccagtggctgggcgaccgcgtgatcaccaccagcacccgcacctgggccctgcccacctacaacaaccacctgtacaagcagatcagcaacagcaccagcggcggcagcagcaacgacaacgcctacttcggctacagcaccccctggggctacttcgacttcaaccgcttccactgccacttcagcccccgcgactggcagcgcctgatcaacaacaactggggcttccgccccaagcgcctgaacttcaagctgttcaacatccaggtgaaggaggtgaccgacaacaacggcgtgaagaccatcgccaacaacctgaccagcaccgtgcaggtgttcaccgacagcgactaccagctgccctacgtgctgggcagcgcccacgagggctgcctgccccccttccccgccgacgtgttcatgatcccccagtacggctacctgaccctgaacgacggcagccaggccgtgggccgcagcagcttctactgcctggagtacttccccagccagatgctgcgcaccggcaacaacttccagttcagctacgagttcgagaacgtgcccttccacagcagctacgcccacagccagagcctggaccgcctgatgaaccccctgatcgaccagtacctgtactacctgagcaagaccatcaacggcagcggccagaaccagcagaccctgaagttcagcgtggccggccccagcaacatggccgtgcagggccgcaactacatccccggccccagctaccgccagcagcgcgtgagcaccaccgtgacccagaacaacaacagcgagttcgcctggcccggcgccagcagctgggccctgaacggccgcaacagcctgatgaaccccggccccgccatggccagccacaaggagggcgaggaccgcttcttccccctgagcggcagcctgatcttcggcaagcagggcaccggccgcgacaacgtggacgccgacaaggtgatgatcaccaacgaggaggagatcaagaccaccaaccccgtggccaccgagagctacggccaggtggccaccaaccaccagagcgcccaggcccaggcccagaccggctgggtgcagaaccagggcatcctgcccggcatggtgtggcaggaccgcgacgtgtacctgcagggccccatctgggccaagatcccccacaccgacggcaacttccaccccagccccctgatgggcggcttcggcatgaagcacccccccccccagatcctgatcaagaacacccccgtgcccgccgacccccccaccgccttcaacaaggacaagctgaacagcttcatcacccagtacagcaccggccaggtgagcgtggagatcgagtgggagctgcagaaggagaacagcaagcgctggaaccccgagatccagtacaccagcaactactacaagagcaacaacgtggagttcgccgtgaacaccgagggcgtgtacagcgagccccgccccatcggcacccgctacctgacccgcaacctgtaa

SEQ ID NO: 1539 - DNA, 2211 bp, Artificial Sequence
  Description of Artificial Sequence: Synthetic polynucleotide
atggctgccgatggttatcttccagattggctcgaggacactctctctgaaggaataagacagtggtggaagctcaaacctggcccaccaccaccaaagcccgcagagcggcataaggacgacagcaggggtcttgtgcttcctgggtacaagtacctcggacccttcaacggactcgacaagggagagccggtcaacgaggcagacgccgcggccctcgagcacgacaaggcctacgaccagcagctcaaggccggagacaacccgtacctcaagtacaaccacgccgacgccgagttccaggagcggctcaaagaagatacgtcttttgggggcaacctcggacgagcagtcttccaggccaagaagcgggttctcgaacctctcggtctggttgaggaaggcgctaagacggctcctggaaagaaacgtccggtagagcagtcgccacaagagccagactcctcctcgggcattggcaagacaggccagcagcccgctaaaaagagactcaattttggtcagactggcgactcagagtcagtccccgacccacaacctctcggagaacctccagcaacccccgctgctgtgggacctactacaatggcttcaggcggtggcgcaccaatggcggacaataacgaaggcgccgatggagtgggtagttcctcgggaaattggcattgcgattcccaatggctgggggacagagtcatcaccaccagcacccgaacatgggccttgcccacctataacaaccacctctacaagcaaatctccagtgcttcaacgggggccagcaacgacaaccactacttcggctacagcaccccctgggggtattttgacttcaacagattccactgccacttctcaccacgtgactggcagcgactcatcaacaacaactggggattccgacccaagagactcaacttcaagctctttaacattcaagtcaaggaggtcacgcagaatgaaggcaccaagaccatcgccaataacctcaccagcaccatccaggtgtttacggactcggagtaccagctgccgtacgttctcggctccgcccaccagggctgcctgcctccgttcccggcggacgtgttcatgattccccagtacggctacctaacactcaacaacggtagtcaggccgtgggacgctcctccttctactgcctggaatactttccttcgcagatgctgagaaccggcaacaacttccagtttacttacaccttcgaggacgtgcctttccacagcagctacgcccacagccagagcttggaccggctgatgaatcctctgattgaccagtacctgtactacttgtctcggactcaaacaacaggaggcacggcaaatacgcagactctgggcttcagccaaggtgggcctaatacaatggccaatcaggcaaagaactggctgccaggaccctgttaccgccaacaacgcgtctcaacgacaaccgggcaaaacaacaatagcaactttgcctggactgctgggaccaaataccatctgaatggaagaaattcattggctaatcctggcatcgctatggcaacacacaaagacgacaaggagcgtttttttcccagtaacgggatcctgatttttggcaaacaaaatgctgccagagacaatgcggattacagcgatgtcatgctcaccagcgaggaagaaatcaaaaccactaaccctgtggctacagaggaatacggtatcgtggcagataacttgcagcagcaaaacacggctcctcaaattggaactgtcaacagccagggggccttacccggtatggtctggcagaaccgggacgtgtacctgcagggtcccatctgggccaagattcctcacacggacggcaacttccacccgtctccgctgatgggcggctttggcctgaaacatcctccgcctcagatcctgatcaagaacacgcctgtacctgcggatcctccgaccaccttcaaccagtcaaagctgaactctttcatcacgcaatacagcaccggacaggtcagcgtggaaattgaatgggagctgcagaaagaaaacagcaaacgctggaacccagagattcaatacacttccaactactacaaatctacaagtgtggactttgctgttaatacagaaggcgtgtactctgaaccccaccccattggcacccgttacctcacccgtcccctgtaa

SEQ ID NO: 1540 - DNA, 2211 bp, Artificial Sequence
  Description of Artificial Sequence: Synthetic polynucleotide
atggctgccgatggttatcttccagattggctcgaggacaacctctctgagggcattcgcgagtggtgggcgctgaaacctggagccccgaagcccaaagccaaccagcaaaagcaggacgacggccggggtctggtgcttcctggctacaagtacctcggacccttcaacggactcgacaagggggagccggtcaacgcagcagacgcggcggccctcgagcacgacaaggcctacgaccagcagctcaaggccggagacaacccgtacctcaagtacaaccacgccgacgccgagttccaggagcggctcaaagaagatacgtcttttgggggcaacctcgggcgagcagtcttccaggccaaaaagaggcttcttgaacctcttggtctggttgaggaagcggctaagacggctcctggaaagaagaggcctgtagagcagtctcctcaggaaccggactcctccgcgggtattggcaaatcgggtgcacagcccgctaaaaagagactcaattttggtcagactggcgactcagagtcagtccccgacccacaacctctcggagaacctccagcaacccccgctgctgtgggacctactacaatggcttcaggcggtggcgcaccaatggcagacaataacgaaggcgccgacggagtgggtaatgcctcaggaaattggcattgcgattccacatggctgggcgacagagtcatcaccaccagcacccgaacctgggccctgcccacctacaataaccacctctacaagcaaatctccagtgcttcaacgggggccagcaacgacaaccactacttcggctacagcaccccctgggggtattttgatttcaacagattccactgccacttttcaccacgtgactggcagcgactcatcaacaacaattggggattccggcccaagagactcaacttcaaactcttcaacatccaagtcaaggaggtcacgcagaatgaaggcaccaagaccatcgccaataacctcaccagcaccatccaggtgtttacggactcggagtaccagctgccgtacgttctcggctctgcccaccagggctgcctgcctccgttcccggcggacgtgttcatgattccccagtacggctacctaacactcaacaacggtagtcaggccgtgggacgctcctccttctactgcctggaatactttccttcgcagatgctgagaaccggcaacaacttccagtttacttacaccttcgaggacgtgcctttccacagcagctacgcccacagccagagcttggaccggctgatgaatcctctgattgaccagtacctgtactacttgtctcggactcaaacaacaggaggcacggcaaatacgcagactctgggcttcagccaaggtgggcctaatacaatggccaatcaggcaaagaactggctgccaggaccctgttaccgccaacaacgcgtctcaacgacaaccgggcaaaacaacaatagcaactttgcctggactgctgggaccaaataccatctgaatggaagaaattcattggctaatcctggcatcgctatggcaacacacaaagacgacaaggagcgtttttttcccagtaacgggatcctgatttttggcaaacaaaatgctgccagagacaatgcggattacagcgatgtcatgctcaccagcgaggaagaaatcaaagccactaaccctgtggctacagaggaatacggtatcgtggcagataacttgcagcagcaaaacacggctcctcaaattggaactgtcaacagccagggggccttacccggtatggtttggcagaaccgggacgtgtacctgcagggtcccatctgggccaagattcctcacacggacggcaacttccacccgtctccgctgatgggcggctttggcctgaaacatcctccgcctcagatcctgatcaagaacacgcctgtacctgcggatcctccgaccaccttcaaccagtcaaagctgaactctttcatcacgcaatacagcaccggacaggtcagcgtggaaattgaatgggagctgcagaaggaaaacagcaagcgctggaaccccgagatccagtacacctccaactactacaaatctacaagtgtggactttgctgttaatacagaaggcgtgtactctgaaccccaccccattggcacccgttacctcacccgtcccctgtaa

SEQ ID NO: 1541 - DNA, 2214 bp, Artificial Sequence
  Description of Artificial Sequence: Synthetic polynucleotide
atggctgccgatggttatcttccagattggctcgaggacaacctctctgagggcattcgcgagtggtgggacttgaaacctggagccccgaagcccaaagccaaccagcaaaagcaggacgacggccggggtctggtgcttcctggctacaagtacctcggacccttcaacggactcgacaagggggagcccgtcaacgcggcggacgcagcggccctcgagcacgacaaggcctacgaccagcagctcaaagcgggtgacaatccgtacctgcggtataaccacgccgacgccgagtttcaggagcgtctgcaagaagatacgtcttttgggggcaacctcgggcgagcagtcttccaggccaagaagcgggttctcgaacctctcggtctggttgaggaaggcgctaatacggctcctggaaagaaacgtccggtagagcagtcgccacaagagccagactcctccgcgggtattggcaaatcgggtgcacagcccgctaaaaagagactcaatttcggtcagactggcgacacagagtcagtcccagaccctcaaccaatcggagaacctcccgcagccccctcaggtgtgggatctcttacaatggcttcaggtggtggcgcaccagtggcagacaataacgaaggtgccgatggagtgggtagttcctcgggaaattggcattgcgattcccaatggctgggggacagagtcatcaccaccagcacccgaacctgggccctgcccacctacaacaatcacctctacaagcaaatctccaacagcacatctggaggatcttcaaatgacaacgcctacttcggctacagcaccccctgggggtattttgacttcaacagattccactgccacttctcaccacgtgactggcagcgactcatcaacaacaactggggattccggcctaagcgactcaacttcaagctcttcaacattcaggtcaaagaggttacggacaacaatggagtcaagaccatcgccaataacctcaccagcaccatccaggtgtttacggactcggagtaccagctgccgtacgttctcggctccgcccaccagggctgcctgcctccgttcccggcggacgtgttcatgattccccagtacggctacctaacactcaacaacggtagtcaggccgtgggacgctcctccttctactgcctggaatactttccttcgcagatgctgagaaccggcaacaacttccagtttacttacaccttcgaggacgtgcctttccacagcagctacgcccacagccagagcttggaccggctgatgaatcctctgattgaccagtacctgtactacttgtctcggactcaaacaacaggaggcacggcaaatacgcagactctgggcttcagccaaggtgggcctaatacaatggccaatcaggcaaagaactggctgccaggaccctgttaccgccaacaacgcgtctcaacgacaaccgggcaaaacaacaatagcaactttgcctggactgctgggaccaaataccatctgaatggaagaaattcattggctaatcctggcatcgctatggcctcacacaaagacgacaaggagcgtttttttcccagtaacgggatcctgatttttggcaaacaaaatgctgccagagacaatgcggattacagcgatgtcatgctcaccagcgaggaagaaatcaaaaccactaaccctgtggctacagaggaatacggtatcgtggcagataacttgcagcagcaaaacacggctcctcaaattggaactgtcaacagtcaaggagccttacctggcatggtctggcagaaccgggacgtgtacctgcagggtcccatctgggccaagattcctcacacggacggcaacttccacccgtctccgctgatgggcggctttggcctgaaacatcctccgcctcagatcctgatcaagaacacgcctgtacctgcggatcctccgaccaccttcaaccagtcaaagctgaactctttcatcacgcaatacagcaccggacaggtcagcgtggaaattgaatgggagctgcagaaggaaaacagcaagcgctggaaccccgagatccagtacaccaccaactactacaaatctacaagtgtggactttgctgttaatacagaaggcgtgtactctgaaccccaccccattggcacccgttacctcacccgtcccctgtaa

SEQ ID NO: 1542 - DNA, 2211 bp, Artificial Sequence
  Description of Artificial Sequence: Synthetic polynucleotide
atggctgccgatggttatcttccagattggctcgaggacaacctctctgagggcattcgcgagtggtgggcgctgaaacctggagccccgaagcccaaagccaaccagcaaaagcaggacgacggccggggtctggtgcttcctggctacaagtacctcggacccttcaacggactcgacaaaggagagccggtcaacgaggcggacgcggcagccctcgaacacgacaaagcttacgaccagcagctcaaggccggtgacaatccgtacctgcggtataaccacgccgacgccgagtttcaggagcgtcttcaagaagatacgtcttttgggggcaacctcgggcgagcagtcttccaggccaagaagcgggttctcgaacctctcggtctggttgaggaaggcgctaagacggctcctggaaagaaacgtccggtagagcagtcgccacaagagccagactcctcctcgggcatcggcaagacaggccagcagcccgctaaaaagagactcaattttggtcagactggcgactcagagtcagtccccgacccacaacctctcggagaacctccagcaacccccgctgctgtgggacctactacaatggcttcaggcggtggcgcaccaatggcagacaataacgaaggcgccgacggagtgggtaatgcctcaggaaattggcattgcgattccacatggctgggcgacagagtcatcaccaccagcacccgcacctgggccttgcccacctacaataaccacctctacaagcaaatctccagtgcttcaacgggggccagcaacgacaaccactacttcggctacagcaccccctgggggtattttgactttaacagattccactgccacttttcaccacgtgactggcaaagactcatcaacaacaactggggattccggcccaagagactcaacttcaagctcttcaacatccaggtcaaggaggtcacgcagaatgaaggcaccaagaccatcgccaataaccttaccagcacgattcaggtctttacggactcggaataccagctcccgtacgtcctcggctctgcgcaccagggctgcctccctccgttcccggcggacgtgttcatgattccgcagtacggctacctaacactcaacaacggtagtcaggccgtgggacgctcctccttctactgcctggaatactttccttcgcagatgctgagaaccggcaacaacttccagtttacttacaccttcgaggacgtgcctttccacagcagctacgcccacagccagagcttggaccggctgatgaatcctctgattgaccagtacctgtactacttgtctcggactcaaacaacaggaggcacggcaaatacgcagactctgggcttcagccaaggtgggcctaatacaatggccaatcaggcaaagaactggctgccaggaccctgttaccgccaacaacgcgtctcaacgacaaccgggcaaaacaacaatagcaactttgcctggactgctgggaccaaataccatctgaatggaagaaattcattggctaatcctggcatcgctatggcaacacacaaagacgacaaggagcgtttttttcccagtaacgggatcctgatttttggcaaacaaaatgctgccagagacaatgcggattacagcgatgtcatgctcaccagcgaggaagaaatcaaaaccactaaccctgtggctacagaggaatacggtatcgtggcagataacttgcagcagcaaaacacggctcctcaaattggaactgtcaacagccagggggccttacccggtatggtctggcagaaccgggacgtgtacctgcagggtcccatctgggccaagattcctcacacggacggcaacttccacccgtctccgctgatgggcggctttggcctgaaacatcctccgcctcagatcctgatcaagaacacgcctgtacctgcggatcctccgaccaccttcaaccagtcaaagctgaactctttcatcacgcaatacagcaccggacaggtcagcgtggaaattgaatgggagctgcagaaggaaaacagcaagcgctggaaccccgagatccagtacacctccaactactacaaatctacaagtgtggactttgctgttaatacagaaggcgtgtactctgaaccccaccccattggcacccgttacctcacccgtcccctgtaa

SEQ ID NO: 1543 - DNA, 2211 bp, Artificial Sequence
  Description of Artificial Sequence: Synthetic polynucleotide
atggctgccgatggttatcttccagattggctcgaggacaacctctctgagggcattcgcgagtggtgggcgctgaaacctggagccccgaagcccaaagccaaccagcaaaagcaggacgacggccggggtctggtgcttcctggctacaagtacctcggacccttcaacggactcgacaaaggagagccggtcaacgaggcggacgcggcagccctcgaacacgacaaagcttacgaccagcagctcaaagcgggtgacaatccgtacctgcggtataaccacgccgacgccgagtttcaggagcgtctgcaagaagatacgtcttttgggggcaacctcgggcgagcagtcttccaggccaagaagagggttctcgaaccttttggtctggttgaggaaggtgctaagacggctcctggaaagaaacgtccggtagagcagtcgccacaagagccagactcctcctcgggcattggcaagacaggccagcagcccgctaaaaagagactcaattttggtcagactggcgactcagagtcagtccccgacccacaacctctcggagaacctccagcaacccccgctgctgtgggacctactacaatggcttcaggcggtggcgcaccaatggcagacaataacgaaggcgccgacggagtgggtaatgcctcaggaaattggcattgcgattcccaatggctgggcgacagagtcatcaccaccagcaccagaacctgggccttgcccacctataacaaccacctctacaagcaaatctccagtgcttcaacgggggccagcaacgacaaccactacttcggctacagcaccccctgggggtattttgatttcaacagattccactgccacttctcaccacgtgactggcagcgactcatcaacaacaactggggattccggcctaagcgactcaacttcaagctcttcaacattcaggtcaaagaggttacggacaacaatggagtcaagaccatcgccaataaccttaccagcacggttcaagtcttctcggactcggagtaccagttgccgtacgtcctcggctctgcgcaccagggctgcctccctccgttcccggcggacgtgttcatgattccccagtacggctacctaacactcaacaacggtagtcaggccgtgggacgctcctccttctactgcctggaatactttccttcgcagatgctgagaaccggcaacaacttccagtttacttacaccttcgaggacgtgcctttccacagcagctacgcgcacagccagagcttggaccggctgatgaatcctctgattgaccagtacctgtactacttgtctcggactcaaacaacaggaggcacggcaaatacgcagactctgggcttcagccaaggtgggcctaatacaatggccaatcaggcaaagaactggctgccaggaccctgttaccgccaacaacgcgtctcaacgacaaccgggcaaaacaacaatagcaactttgcctggactgctgggaccaaataccatctgaatggaagaaattcattggctaatcctggcatcgctatggcaacacacaaagacgacaaggagcgtttttttcccagtaacgggatcctgatttttggcaaacaaaatgctgccagagacaatgcggattacagcgatgtcatgctcaccagcgaggaagaaatcaaaaccactaaccctgtggctacagaggaatacggtatcgtggcagataacttgcagcagcaaaacacggctcctcaaattggaactgtcaacagccagggggccttacccggtatggtctggcagaaccgggacgtgtacctgcagggtcccatctgggccaagattcctcacacggacggcaacttccacccgtctccgctgatgggcggctttggcctgaaacatcctccgcctcagatcctgatcaagaacacgcctgtacctgcggatcctccgaccaccttcaaccagtcaaagctgaactctttcatcacgcaatacagcaccggacaggtcagcgtggaaattgaatgggagctgcagaaggaaaacagcaagcgctggaaccccgagatccagtacacctccaactactacaaatctacaagtgtggactttgctgttaatacagaaggcgtgtactctgaaccccaccccattggcacccgttacctcacccgtcccctgtaa

SEQ ID NO: 1544 - DNA, 2244 bp, Artificial Sequence
  Description of Artificial Sequence: Synthetic polynucleotide
  misc_feature (2241)..(2241): n is a, c, g, or t
atggctgccgatggttatcttccagattggctcgaggacactctctctgaaggaataagacagtggtggaagctcaaacctggcccaccaccaccaaagcccgcagagcggcataaggacgacagcaggggtcttgtgcttcctgggtacaagtacctcggacccttcaacggactcgacaagggagagccggtcaacgaggcagacgccgcggccctcgagcacgacaaagcctacgaccggcagctcgacagcggagacaacccgtacctcaagtacaaccacgccgacgcggagtttcaggagcgccttaaagaagatacgtcttttgggggcaacctcgggcgagcagtcttccaggccaagaagagggttctcgaaccttttggtctggttgaggaaggtgctaagacggctcctggaaagaaacgtccggtagagcagtcgccacaagagccagactcctcctcgggcattggcaagacaggccagcagcccgctaaaaagagactcaattttggtcagactggcgactcagagtcagtccccgacccacaacctctcggagaacctccagcaacccccgctgctgtgggacctactacaatggcttcaggcggtggcgcaccaatggcagacaataacgaaggcgccgacggagtgggtaatgcctcaggaaattggcattgcgattccacatggctgggcgacagagtcatcaccaccagcacccgaacatgggccttgcccacctataacaaccacctctacaagcaaatctccagtgcttcaacgggggccagcaacgacaaccactacttcggctacagcaccccctgggggtattttgacttcaacagattccactgccacttctcaccacgtgactggcagcgactcatcaacaacaactggggattccggcctaagcgactcaacttcaagctcttcaacattcaggtcaaagaggttacggacaacaatggagtcaagaccatcgccaataaccttaccagcacggtccaggtcttcacggactcagactatcagctcccgtacgtgctcgggtcggctcacgagggctgcctcccgccgttcccagcggacgttttcatgattcctcagtacggctacctaacactcaacaacggtagtcaggccgtgggacgctcctccttctactgcctggaatactttccttcgcagatgctgagaaccggcaacaacttccagtttacttacaccttcgaggacgtgcctttccacagcagctacgcgcacagccagagcttggaccggctgatgaatcctctgattgaccagtacctgtactacttgtctcggactcaaacaacaggaggcacggcaaatacgcagactctgggcttcagccaaggtgggcctaatacaatggccaatcaggcaaagaactggctgccaggaccctgttaccgccaacaacgcgtctcaacgacaaccgggcaaaacaacaatagcaactttgcctggactgctgggaccaaataccatctgaatggaagaaattcattggctaatcctggcatcgctatggcaacacacaaagacgacaaggagcgtttttttcccagtaacgggatcctgatttttggcaaacaaaatgctgccagagacaatgcggattacagcgatgtcatgctcaccagcgaggaagaaatcaaaaccactaaccctgtggctacagaggaatacggtatcgtggcagataacttgcagcagcaaaacacggctcctcaaattggaactgtcaacagccagggggccttacccggtatggtctggcagaaccgggacgtgtacctgcagggtcccatctgggccaagattcctcacacggacggcaacttccacccgtctccgctgatgggcggctttggcctgaaacatcctccgcctcagatcctgatcaagaacacgcctgtacctgcggatcctccgaccaccttcaaccagtcaaagctgaactctttcatcacgcaatacagcaccggacaggtcagcgtggaaattgaatgggagctgcagaaggaaaacagcaagcgctggaaccccgagatccagtacacctccaactactacaaatctacaagtgtggactttgctgttaatacagaaggcgtgtactctgaaccccaccccattggcaccagatacctgactcgtaatctgtaattgcttgttaatcaataaaccgtttaattnttt

SEQ ID NO: 1545 - DNA, 2217 bp, Artificial Sequence
  Description of Artificial Sequence: Synthetic polynucleotide
atggctgccgatggttatcttccagattggctcgaggacaacctctctgagggcattcgcgagtggtgggacttgaaacctggagccccgaaacccaaagccaaccagcaaaagcaggacgacggccggggtctggtgcttcctggctacaagtacctcggacccttcaacggactcgacaagggggagcccgtcaacgcggcggacgcagcggccctcgagcacgacaaggcctacgaccagcagctccaagcgggtgacaatccgtacctgcggtataaccacgccgacgccgagtttcaggagcgtctgcaagaagatacgtcttttgggggcaacctcggacgagcagtcttccaggcgaaaaagagggttctcgaacctctcggtctggttgaggaaggcgctaagacggctcctggaaagaagagaccggtagagccatcaccccagcgttctccagactcctctacgggcatcggcaagaaaggccaacagcccgccagaaaaagactcaattttggtcagactggcgactcagagtcagttccagaccctcaacctctcggagaacctccagcagcgccctctggtgtgggacctaatacaatggctgcaggcggtggcgcaccaatggcagacaataacgaaggcgccgacggagtgggtagttcctcgggaaattggcattgcgattcccaatggctgggggacagagtcatcaccaccagcacccgaacctgggccctgcccacctacaacaatcacctctacaagcaaatctccaacagcacatctggaggatcttcaaatgacaacgcctacttcggctacagcaccccctgggggtattttgacttcaaccgcttccactgccacttctcaccacgtgactggcagcgactcatcaacaacaactggggattccggcccaagagactcagcttcaaactcttcaacatccaggtcaaggaggtcacgcagaatgaaggcaccaagaccatcgccaataacctcaccagcaccatccaggtgtttacggactcggagtaccagctgccgtacgttctcggctctgcccaccagggctgcctgcctccgttcccggcggacgtgttcatgattcctcagtacggctacctaacgctcaacaatggcagccaggcagtgggacggtcatccttttactgcctggaatatttcccatcgcagatgctgagaacgggcaacaactttaccttcagctacacctttgaggacgttcctttccacagcagctacgctcacagccagagtctggaccgtctcatgaatcctctgattgaccagtacctgtactacttgtctcggactcaaacaacaggaggcacggcaaatacgcagactctgggcttcagccaaggtgggcctaatacaatggccaatcaggcaaagaactggctgccaggaccctgttaccgccaacaacgcgtctcaacgacaaccgggcaaaacaacaatagcaactttgcctggactgctgggaccaaataccatctgaatggaagaaattcattggctaatcctggcatcgctatggcaacacacaaagacgacaaggagcgtttttttcccagtaacgggatcctgatttttggcaaacaaaatgctgccagagacaatgcggattacagcgatgtcatgctcaccagcgaggaagaaatcaaaaccactaaccctgtggctacagaggaatacggtatcgtggcagataacttgcagcagcaaaacacggctcctcaaattggaactgtcaacagccagggggccttacccggtatggtctggcagaaccgggacgtgtacctgcagggtcccatctgggccaagattcctcacacggacggcaacttccacccgtctccgctgatgggcggctttggacttaagcacccgcctcctcagatcctcatcaaaaacacgcctgttcctgcggatcctccgaccaccttcaaccagtcaaagctgaactctttcatcacgcaatacagcaccggacaggtcagcgtggaaattgaatgggagctgcagaaggaaaacagcaagcgctggaaccccgagatccagtacacctccaactactacaaatctacaagtgtggactttgctgttaatacagaaggcgtgtactctgaaccccaccccattggcacccgttacctcacccgtcccctgtaa

SEQ ID NO: 1546 - DNA, 2214 bp, Artificial Sequence
  Description of Artificial Sequence: Synthetic polynucleotide
atggctgccgatggttatcttccagattggctcgaggacaacctctctgagggcattcgcgagtggtgggacttgaaacctggagccccgaagcccaaagccaaccagcaaaagcaggacgacggccggggtctggtgcttcctggctacaagtacctcggacccttcaacggactcgacaagggggagcccgtcaacgcggcggatgcagcggccctcgagcacgacaaagcctacgaccagcagctcaaagcgggtgacaatccgtacctgcggtataaccacgccgacgccgagtttcaggagcgtctgcaagaagatacgtcttttgggggcaacctcgggcgagcagtcttccaggccaagaagagggttctcgaaccttttggtctggttgaggaaggtgctaagacggctcctggaaagaaacgtccggtagagcagtcgccacaagagccagactcctcctcgggcattggcaagacaggccagcagcccgctaaaaagagactcaattttggtcagactggcgactcagagtcagtccccgacccacaacctctcggagaacctccagcaacccccgctgctgtgggacctactacaatggcttcaggcggtggcgcacccatgcaagacaataacgaaggcgccgacggagtgggtagttcctcgggaaattggcattgcgattccacatggctgggcgacagagtcatcaccaccagcacccgaacctgggccctgcccacctacaacaaccacctctacaagcaaatctccaacgggacatcgggaggagccaccaacgacaacacctacttcggctacagcaccccctgggggtattttgactttaacagattccactgccacttttcaccacgtgactggcagcgactcatcaacaacaactggggattccggcccaagagactcaacttcaagctcttcaacatccaggtcaaggaggtcacgcagaatgaaggcaccaagaccatcgccaataaccttaccagcacgattcaggtctttacggattcggaataccagctcccgtacgtcctcggctctgcgcaccagggctgcctccctccgttcccggcggacgtgttcatgattccgcagtacggctacctaacgctcaacaatggtagccaggcagtgggacggtcatccttttactgcctggaatatttcccatcgcagatgctgagaacgggcaacaactttaccttcagctacacctttgaggacgttcctttccacagcagctacgctcacagccagagtctggaccgtctcatgaatcctctgattgaccagtacctgtactacttgtctcggactcaaacaacaggaggcacggcaaatacgcagactctgggcttcagccaaggtgggcctaatacaatggccaatcaggcaaagaactggctgccaggaccctgttaccgccaacaacgcgtctcaacgacaaccgggcaaaacaacaatagcaactttgcctggactgctgggaccaaataccatctgaatggaagaaattcattggctaatcctggcatcgctatggcaacacacaaagacgacaaggagcgtttttttcccagtaacgggatcctgatttttggcaaacaaaatgctgccagagacaatgcggattacagcgatgtcatgctcaccagcgaggaagaaatcaaaaccactaaccctgtggctacagaggaatacggtatcgtggcagataacttgcagcagcaaaacacggctcctcaaattggaactgtcaacagccagggggccttacccggtatggtctggcagaaccgggacgtgtacctgcagggtcccatctgggccaagattcctcacacggacggcaacttccacccgtctccgctgatgggcggctttggcctgaaacatcctccgcctcagatcctgatcaagaacacgcctgtacctgcggatcctccgaccaccttcaaccagtcaaagctgaactctttcatcacgcaatacagcaccggacaggtcagcgtggaaattgaatgggagctgcagaaggaaaacagcaagcgctggaaccccgagatccagtacacctccaactactacaaatctacaagtgtggactttgctgttaatacagaaggcgtgtactctgaaccccaccccattggcacccgttacctcacccgtcccctgtaa

SEQ ID NO: 1547 - DNA, 2211 bp, Artificial Sequence
  Description of Artificial Sequence: Synthetic polynucleotide
atggctgccgatggttatcttccagattggctcgaggacaacctctctgagggcattcgcgagtggtgggcgctgaaacctggagccccgaagcccaaagccaaccagcaaaagcaggacgacggccggggtctggtgcttcctggctacaagtacctcggacccttcaacggactcgacaagggggagcccgtcaacgcggcggacgcagcggccctcgagcacgacaaggcctacgaccagcagctcaaagcgggtgacaatccgtacctgcggtataaccacgccgacgccgagtttcaggagcgtctgcaagaagatacgtcttttgggggcaacctcgggcgagcagtcttccaggccaagaagcgggttctcgaacctctcggtctggttgaggaaggcgctaagacggctcctggaaagaaacgtccggtagagcagtcgccacaagagccagactcctcctcgggcatcggcaagacaggccagcagcccgctaaaaagagactcaattttggtcagactggcgactcagagtcagtccccgacccacaacctctcggagaacctccagcaacccccgctgctgtgggacctactacaatggcttcaggcggtggcgcaccaatggcagacaataacgaaggcgccgacggagtgggtagttcctcgggaaattggcattgcgattccacatggctgggcgacagagtcatcaccaccagcacccgcacctgggccttgcccacctacaataaccacctctacaagcaaatctccagtgcttcaacgggggccagcaacgacaaccactacttcggctacagcaccccctgggggtattttgacttcaacagattccactgccacttctcaccacgtgactggcagcgactcatcaacaacaactggggattccggcctaagcgactcaacttcaagctcttcaacattcaggtcaaagaggttacggacaacaatggagtcaagaccatcgccaataaccttaccagcacggtccaggtcttcacggactcagactatcagctcccgtacgtgctcgggtcggctcacgagggctgcctcccgccgttcccagcggacgttttcatgattcctcagtacgggtatctgacgctcaacaatggcagccaggcagtgggacggtcatccttttactgcctggaatatttcccatcgcagatgctgagaacgggcaataactttaccttcagctacaccttcgaggacgtgcctttccacagcagctacgcgcacagccagagcctggaccggctgatgaatcctctgattgaccagtacctgtactacttgtctcggactcaaacaacaggaggcacggcaaatacgcagactctgggcttcagccaaggtgggcctaatacaatggccaatcaggcaaagaactggctgccaggaccctgttaccgccaacaacgcgtctcaacgacaaccgggcaaaacaacaatagcaactttgcctggactgctgggaccaaataccatctgaatggaagaaattcattggctaatcctggcatcgctatggcaacacacaaagacgacaaggagcgtttttttcccagtaacgggatcctgatttttggcaaacaaaatgctgccagagacaatgcggattacagcgatgtcatgctcaccagcgaggaagaaatcaaaaccactaaccctgtggctacagaggaatacggtatcgtggcagataacttgcagcagcaaaacacggctcctcaaattggaactgtcaacagccagggggccttacccggtatggtctggcagaaccgggacgtgtacctgcagggtcccatctgggccaagattcctcacacggacggcaacttccacccgtctccgctgatgggcggctttggcctgaaacatcctccgcctcagatcctgatcaagaacacgcctgtacctgcggatcctccgaccaccttcaaccagtcaaagctgaactctttcatcacgcaatacagcaccggacaggtcagcgtggaaattgaatgggagctgcagaaggaaaacagcaagcgctggaaccccgagatccagtacacctccaactactacaaatctacaagtgtggactttgctgttaatacagaaggcgtgtactctgaaccccaccccattggcacccgttacctcacccgtcccctgtaa

SEQ ID NO: 1548 - DNA, 2214 bp, Artificial Sequence
  Description of Artificial Sequence: Synthetic polynucleotide
atggctgccgatggttatcttccagattggctcgaggacaacctctctgagggcattcgcgagtggtgggacttgaaacctggagccccgaaacccaaagccaaccagcaaaagcaggacgacggccggggtctggtgcttcctggctacaagtacctcggacccttcaacggactcgacaagggggagcccgtcaacgcggcggatgcagcggccctcgagcacgacaaggcctacgaccagcagctcaaagcgggtgacaatccgtacctgcggtataaccacgccgacgccgagtttcaggagcgtctgcaagaagatacgtcttttgggggcaacctcgggcgagcagtcttccaggccaagaagcgggttctcgaacctctcggtctggttgaggaaggcgctaagacggctcctggaaagaagagaccggtagagccatcaccccagcgttctccagactcctctacgggcatcggcaagaaaggccaacagcccgccagaaaaagactcaattttggtcagactggcgactcagagtcagtccccgacccacaacctctcggagaacctccagcaacccccgctgctgtgggacctactacaatggcttcaggcggtggcgcaccaatggcagacaataacgaaggcgccgacggagtgggtaatgcctcaggaaattggcattgcgattccacatggctgggcgacagagtcatcaccaccagcacccgaacatgggccttgcccacctataacaaccacctctacaagcaaatctccagtgcttcaacgggggccagcaacgacaaccactacttcggctacagcaccccctgggggtattttgatttcaacagattccactgccatttctcaccacgtgactggcagcgactcatcaacaacaatttgggatcccggcccaagagactcaacttcaagctcttcatcatccaagtcaaggaggtcacgacgaatgatggcgtcacgaccatcgctaataaccttaccagcacggttcaagtcttctcggactcggagtaccagttgccgtacgtcctcggctctgcgcaccagggctgcctccctccgttcccggcggacgtgttcatgattccgcagtacggctacctaacgctcaacaatggcagccaggcagtgggacggtcatccttttactgcctggaatatttcccatcgcagatgctgagaacgggcaataactttaccttcagctacaccttcgaggacgtgcctttccacagcagctacgcgcacagccagagcctggaccggctgatgaatcctctcatcgaccagtacctgtattacctgaacagaactcagaatcagtccggaagtgcccaaaacaaggacttgctgtttagccgggggtctccagctggcatgtctgttcagcccaaaaactggctacctggaccctgttaccggcagcagcgcgtttctaaaacaaaaacagacaacaacaacagcaactttacctggactggtgcttcaaaatataaccttaatgggcgtgaatctataatcaaccctggcactgctatggcctcacacaaagacgacaaagacaagttctttcccatgagcggtgtcatgatttttggaaaggagagcgccggagcttcaaacactgcattggacaatgtcatgatcacagacgaagaggaaatcaaagccactaaccccgtggccaccgaaagatttgggactgtggcagtcaatctccagagcagcagcacagaccctgcgaccggagatgtgcatgttatgggagccttacctggaatggtgtggcaagacagagacgtatacctgcagggtcctatttgggccaaaattcctcacacggatggacactttcacccgtctcctctcatgggcggctttggacttaagcacccgcctcctcagatcctcatcaaaaacacgcctgttcctgcgaatcctccggcagagttttcggctacaaagtttgcttcattcatcacccagtattccacaggacaagtgagcgtggagattgaatgggagctgcagaaagaaaacagcaaacgctggaatcccgaagtgcagtatacatctaactatgcaaaatctgccaacgttgatttcactgtggacaacaatggactttatactgagcctcgccccattggcacccgttacctcacccgtcccctgtaa

SEQ ID NO: 1549 - DNA, 2211 bp, Artificial Sequence
  Description of Artificial Sequence: Synthetic polynucleotide
atggctgccgatggttatcttccagattggctcgaggacaacctctctgagggcattcgcgagtggtgggcgctgaaacctggagccccgaaacccaaagccaaccagcaaaagcaggacgacggccggggtctggtgcttcctggctacaagtacctcggacccttcaacggactcgacaagggggagcccgtcaacgcggcggacgcagcggccctcgagcacgacaaggcctacgaccagcagctcaaggcgggtgacaatccgtacctgcggtataaccacgccgacgccgagtttcaggagcgtctgcaagaagatacgtcttttgggggcaacctcgggcgagcagtcttccaggccaaaaagaggcttcttgaacctcttggtctggttgaggaagcggctaagacggctcctggaaagaaacgtccggtagagcagtcgccacaagagccagactcctcctcgggcattggcaagacaggccagcagcccgctaaaaagagactcaactttgggcagactggcgactcagagtcagtgcccgaccctcaaccaatcggagaacctccagcaacccccgctgctgtgggacctactacaatggcttcaggcggtggcgcaccaatggcggacaataacgaaggcgccgatggagtgggtaattcctcgggaaattggcattgcgattccacatggctgggcgacagagtcatcaccaccagcacccgaacctgggccctgcccacctacaacaatcacctctacaagcaaatctccagtgcttcaacgggggccagcaacgacaaccactacttcggctacagcaccccctgggggtattttgatttcaacagattccactgccacttttcaccacgtgactggcagcgactcatcaacaacaactggggattccggcccaagagactcaacttcaagctcttcaacatccaggtcaaggaggtcacgcagaatgaaggcaccaagaccatcgccaataacctcaccagcaccatccaggtgtttacggactcggagtaccagctgccgtacgttctcggctccgcccaccagggctgcctgcctccgttcccggcggacgtgttcatgattccgcagtacggctacctaacgctcaacaatggcagccaggcagtgggacggtcatccttttactgcctggaatatttcccatcgcagatgctgagaacgggcaacaactttaccttcagctacacctttgaggacgttcctttccacagcagctacgctcacagccagagtctggaccgtctcatgaatcctctgattgaccagtacctgtactacttgtctcggactcaaacaacaggaggcacggcaaatacgcagactctgggcttcagccaaggtgggcctaatacaatggccaatcaggcaaagaactggctgccaggaccctgttaccgccaacaacgcgtctcaacgacaaccgggcaaaacaacaatagcaactttgcctggactgctgggaccaaataccatctgaatggaagaaattcattggctaatcctggcatcgctatggcaacacacaaagacgacaaggagcgtttttttcccagtaacgggatcctgatttttggcaaacaaaatgctgccagagacaatgcggattacagcgatgtcatgctcaccagcgaggaagaaatcaaaaccactaaccctgtggctacagaggaatacggtatcgtggcagataacttgcagcagcaaaacacggctcctcaaattggaactgtcaacagccagggggccttacccggtatggtctggcagaaccgggacgtgtacctgcagggtcccatctgggccaagattcctcacacggacggcaacttccacccgtctccgctgatgggcggctttggcctgaaacatcctccgcctcagatcctgatcaagaacacgcctgtacctgcggatcctccgaccaccttcaaccagtcaaagctgaactctttcatcacgcaatacagcaccggacaggtcagcgtggaaattgaatgggagctgcagaaggaaaacagcaagcgctggaaccccgagatccagtacacctccaactactacaaatctacaagtgtggactttgctgttaatacagaaggcgtgtactctgatccccaccccattggcacccgttacctcacccgtcccctgtaa

SEQ ID NO: 1550 - DNA, 2211 bp, Artificial Sequence
  Description of Artificial Sequence: Synthetic polynucleotide
atggctgccgatggttatcttccagattggctcgaggacaacctctctgagggcattcgcgagtggtgggcgctgaaacctggagccccgaagcccaaagccaaccagcaagagcaggacgacggccggggtctggtgcttcctggctacaagtacctcggacccttcaacggactcgacaagggagagcccgtcaacgcggcggatgcagcggccctcgagcacgacaaagcctacgaccagcagctcaaagcgggtgacaatccgtacctgcggtataaccacgccgacgccgagtttcaggagcgtctgcaagaagatacgtcttttgggggcaacctcgggcgagcagtcttccaggccaagaagagggttctcgaaccttttggtctggttgaggaaggtgctaagacggctcctggaaagaaacgtccggtagagcagtcgccacaagagccagactcctcctcgggcattggcaagacaggccagcagcccgctaaaaagagactcaattttggtcagactggcgactcagagtcagttccagaccctcaacctctcggagaacctccagcagcgccctctggtgtgggacctaatacaatggctgcaggcggtggcgcaccaatggcagacaataacgaaggcgccgacggagtgggtagttcctcgggaaattggcattgcgattccacatggctgggcgacagagtcatcaccaccagcacccgaacctgggccctgcccacctacaacaaccacctctacaagcaaatctccagtgcttcaacgggggccagcaacgacaaccactacttcggctacagcaccccctgggggtattttgactttaacagattccactgccacttttcaccacgtgactggcagcgactcatcaacaacaactggggattccggcccaagagactcaacttcaagctcttcaacatccaggtcaaggaggtcacgcagaatgaaggcaccaagaccatcgccaataaccttaccagcacgattcaggtctttacggattcggaataccagctcccgtacgtcctcggctctgcgcaccagggctgcctccctccgttcccggcggacgtgttcatgattccgcagtacggctacctaacgctcaacaatggtagccaggcagtgggacggtcatcctttttctgcctggaatatttcccatcgcagatgctgagaacgggcaacaactttaccttcagctacacctttgaggacgttcctttccacagcagctacgctcacagccagagtctggaccgtctcatgaatcctctgattgaccagtacctgtactacttgtctcggactcaaacaacaggaggcacggcaaatacgcagactctgggcttcagccaaggtgggcctaatacaatggccaatcaggcaaagaactggctgccaggaccctgttaccgccaacaacgcgtctcaacgacaaccgggcaaaacaacaatagcaactttgcctggactgctgggaccaaataccatctgaatggaagaaattcattggctaatcctggcatcgctatggcaacacacaaagacgacaaggagcgtttttttcccagtaacgggatcctgatttttggcaaacaaaatgctgccagagacaatgcggattacagcgatgtcatgctcaccagcgaggaagaaatcaaaaccactaaccctgtggctacagaggaatacggtatcgtggcagataacttgcagcagcaaaacacggctcctcaaattggaactgtcaacagccagggggccttacccggtatggtctggcagaaccgagacgtgtacctgcagggtcccatctgggccaagattcctcacacggacggcaacttccacccgtctccgctgatgggcggctttggcctgaaacatcctccgcctcagatcctgatcaagaacacgcctgtacctgcggatcctccgaccaccttcaaccagtcaaagctgaactctttcatcacgcaatacagcaccggacaggtcagcgtggaaattgaatgggagctgcagaaggaaaacagcaagcgctggaaccccgagatccagtacacctccaactactacaaatctacaagtgtggactttgctgttaatacagaaggcgtgtactctgaaccccaccccattggcacccgttacctcacccgtcccctgtaa

SEQ ID NO: 1551 - DNA, 2211 bp, Artificial Sequence
  Description of Artificial Sequence: Synthetic polynucleotide
atggctgccgatggttatcttccagattggctcgaggacaacctctctgagggcattcgcgagtggtgggacttgaaacctggagccccgaagcccaaagccaaccagcaaaagcaggacgacggccggggtctggtgcttcctggctacaagtacctcggacccttcaacggactcgacaagggggagcccgtcaacgcggcggacgcagcggccctcgagcacgacaaggcctacgaccagcagctcaaagcgggtgacaatccgtacctgcggtataaccacgccgacgccgagtttcaggagcgtctgcaagaagatacgtcttttgggggcaacctcgggcgagcagtcttccaggccaagaagcgggttctcgaacctctcggtctggttgaggaaggcgctaagacggctcctggaaagaaacgtccggtagagcagtcaccacaagagccagactcctcctcgggcatcggcaagacaggccagcagcccgctaaaaagagactcaattttggtcagactggcgactcagagtcagtccccgacccacaacctctcggagaacctccagcaacccccgctgctgtgggacctactacaatggcttcaggcggtggcgcaccaatggcggacaataacgaaggcgccgacggagtgggtaatgcctcaggaaattggcattgcgattccacatggctgggcgacagagtcatcaccaccagcacccgaacatgggccttgcccacctataacaaccacctctacaagcaaatctccagtgcttcaacgggggccagcaacgacaaccactacttcggctacagcaccccctgggggtattttgatttcaacagattccactgccatttctcaccacgtgactggcagcgactcatcaacaacaattggggattccggcccaagagactcaacttcaagctcttcaacatccaagtcaaggaggtcacgacgaatgatggcgtcacgaccatcgctaataaccttaccagcacggttcaagtcttctcggactcggagtaccagttgccgtacgtcctcggctctgcgcaccagggctgcctccctccgttcccggcggacgtgttcatgattccgcagtacggctacctaacgctcaacaatggcagccaggcagtgggacggtcatccttttactgcctggaatatttcccatcgcagatgctgagaacgggcaataactttaccttcagctacaccttcgaggacgtgcctttccacagcagctacgcgcacagccagagcctggaccggctgatgaatcctctcatcgaccagtacctgtattacctgaacagaactcagaatcagtccggaagtgcccaaaacaaggacttgctgtttagccgggggtctccagctggcatgtctgttcagcccaaaaactggctacctggaccctgttaccggcagcagcgcgtttctaaaacaaaaacagacaacaacaacagcaactttacctggacaggtgcttcaaaatataaccttaatgggcgtgaatctataatcaaccctggcactgctatggcctcacacaaagacgacaaagacaagttctttcccatgagcggtgtcatgatttttggaaaggagagcgccggagcttcaaacactgcattggacaatgtcatgatcacagacgaagaggaaatcaaagccactaaccccgtggccaccgaaagatttgggactgtggcagtcaatctccagaacagcagcacagaccctgcgaccggagatgtgcatgttatgggagccttacctggaatggtgtggcaagacagagacgtatacctgcagggtcctatttgggccaaaattcctcacacggatggacactttcacccgtctcctctcatgggcggctttggacttaagcacccgcctcctcagatcctcatcaaaaacacgcctgttcctgcgaatcctccggcagagttttcggctacaaagtttgcttcattcatcacccagtattccacaggacaagtgagcgtggagattgaatgggagctgcagaaagaaaacagcaaacgctggaatcccgaagtgcagtatacatctaactatgcaaaatctgccaacgttgatttcactgtagacaacaatggactttatactgtgcctcgccccattggcacccgttacctcacccgtcccctgtaa

SEQ ID NO: 1552 - DNA, 2211 bp, Artificial Sequence
  Description of Artificial Sequence: Synthetic polynucleotide
atggctgccgatggttatcttccagattggctcgaggacaacctctctgagggcattcgcgagtggtgggcgctgaaacctggagccccgaagcccaaagccaaccagcaaaagcaggacgacggccggggtctggtgcttcctggctacaagtacctcggacccttcaacggactcgacaaaggagagccggtcaacgcggcggacgcggcggccctcgaacacgacaaggcttacgaccagcagctcaaggcgggtgacaacccctacctgcggtataaccacgccgacgccgagttccaggagcggctgcaagaagatacgtcttttgggggcaacctcgggcgagcagtcttccaggccaaaaagaggcttcttgaacctcttggtctggttgaggaaggcgctaagacggctcctggaaagaagaggcctgtagagcagtctcctcaagaaccggactcctcctcgggtattggcaaaacaggtgagcagcccgctaaaaagagactcaattttggtcagactggcgactcagagtcagtccccgacccacaacctctcggagaacctccagcaacccccgctgctgtgggacctactacaatggcttcaggcggtggcgcaccaatggcagacaataacgaaggcgccgacggagtgggtagtgcctcaggaaattggcattgcgattccacatggctgggcgacagagtcatcaccaccagcacccgaacctgggccctgcccacctataacaaccatctctacaagcaaatctccagtgcttcaacgggggccagcaacgacaaccactacttcggctacagcaccccctgggggtattttgacttcaacagattccactgccacttctcaccacgtgactggcagcgactcatcaacaacaactggggattccggcctaagcgactcaacttcaagctcttcaacattcaggtcaaagaggttacggacaacaatggagtcaagaccatcgccaataacctcaccagcaccatccaggtgttcacggactcagagtatcagctgccgtacgtgctcgggtcggctcaccagggctgcctccctccgttcccagcggacgtgttcatgattcctcagtacgggtatctgacactcaacaacggcagtcaggcagtgggacggtcatccttctactgcctggaatattttccatcgcagatgctgagaaccggcaacaactttccgttcagttacaccttcgaggacgtgcctttccacagcagctacgcgcacagccagagcctggaccggctgatgaatcctctgattgaccagtacctgtactacttgtctcggactcaaacaacaggaggcacggcaaatacgcagactctgggcttcagccaaggtgggcctaatacaatggccaatcaggcaaagaactggctgccaggaccctgttaccgccaacaacgcgtctcaacgacaaccgggcaaaacaacaatagcaactttgcctggactgctgggaccaaataccatctgaatggaagaaattcattggctaatcctggcatcgctatggcaacacacaaagacgacaaggagcgtttttttcccagtaacgggatcctgatttttggcaaacaaaatgctgccagagacaatgcggattacagcgatgtcatgctcaccagcgaggaagaaatcaaaaccactaaccctgtggctacagaggaatacggtatcgtggcagataacttgcagcagcaaaacacggctcctcaaattggaactgtcaacagccagggggccttacccggtatggtctggcagaaccgggacgtgtacctgcagggtcccatctgggccaagattcctcacacggacggcaacttccacccgtctccgctgatgggcggctttggcctgaaacatcctccgcctcagatcctgatcaagaacacgcctgtacctgcggatcctccgaccaccttcaaccagtcaaagctgaactctttcatcacgcaatacagcaccggacaggtcagcgtggaaattgaatgggagctgcagaaggaaaacagcaagcgctggaaccccgagatccagtacacctccaactactacaaatctacaagtgtggactttgctgttaatacagaaggcgtgtactctgaaccccaccccattggcacccgttacctcacccgtcccctgtaa

SEQ ID NO: 1553 - DNA, 2211 bp, Artificial Sequence
  Description of Artificial Sequence: Synthetic polynucleotide
atggctgccgatggttatcttccagattggctcgaggacaacctctctgagggcattcgcgagtggtgggcgctgaaacctggagccccgaagcccaaagccaaccagcaaaagcaggacgacggccggggtctggtgcttcctggctacaagtacctcggacccttcaacggactcgacaagggggagcccgtcaacgcggcggacgcagcggccctcgagcacgacaaggcctacgaccagcagctcaaagcgggtgacaatccgtacctgcggtataaccacgccgacgccgagtttcaggagcgtctgcaagaagatacgtcttttgggggcaacctcgggcgagcagtcttccaggccaagaagcgggttctcgaacctctcggtctggttgaggaaggcgctaagacggctcctggaaagaaacgtccggtagaacagtcgccacaagagccagactcctcctcgggcatcggcaagacaggccagcagcccgctaaaaagagactcaattttggtcagactggcgactcagagtcagtccccgatccacaacctctcggagaacctccagcaacccccgctgctgtgggacctactacaatggcttcaggcggtggcgcaccaatggcagacaataacgaaggcgccgacggagtgggtagttcctcgggaaattggcattgcgattcccaatggctgggggacagagtcatcaccaccagcacccgaacctgggccctgcccacctacaacaaccacctctacaagcaaatctccagtgcttcaacgggggccagcaacgacaaccactacttcggctacagcaccccctgggggtattttgatttcaacagattccactgccatttctcaccacgtgactggcagcgactcatcaacaacaactggggattccggcctaagcgactcaacttcaagctcttcaacattcaggtcaaagaggttacggacaacaatggagtcaagaccatcgccaataaccttaccagcacggtccaggtcttcacggactcggagtaccagttgccgtacgtcctcggctctgcgcaccaggactgcctccctccgttcccggcggacgtgttcatgattccgcagtacggctacctaacgctcaacaatggcagccaggcagtgggacggtcatccttttactgcctggaatatttcccatcgcagatgctgagaacgggcaacaactttaccttcagctacacctttgaggacgttcctttccacagcagctacgctcacagccagagtctggaccgtctcatgaatcctctgattgaccagtacctgtactacttgtctcggactcaaacaacaggaggcacggcaaatacgcagactctgggcttcagccaaggtgggcctaatacaatggccaatcaggcaaagaactggctgccaggaccctgttaccgccaacaacgcgtctcaacgacaaccggacaaaacaacaatagcaactttgcctggactgctgggaccaaataccatctgaatggaagaaattcattggctaatcctggcatcgctatggcaacacacaaagacgacaaggagcgtttttttcccagtaacgggatcctgatttttggcaaacaaaatgctgccagagacaatgcggattacagcgatgtcatgctcaccagcgaggaagaaatcaaaaccactaaccctgtggctacagaggaatacggtatcgtggcagataacttgcagcagcaaaacacggctcctcaaattggaactgtcaacagccagggggccttacccggtatggtctggcagaaccgggacgtgtacctgcagggtcccatctgggccaagattcctcacacggacggcaacttccacccgtctccgctgatgggcggctttggcctgaaacatcctccgcctcagatcctgatcaagaacacgcctgtacctgcggatcctccgaccaccttcaaccagtcaaagctgaactctttcatcacgcaatacagcaccggacaggtcagcgtggaaattgaatgggagctgcagaaggaaaacagcaagcgctggaaccccgagatccagtacacctccaactactacaaatctacaagtgtggactttgctgttaatacagaaggcgtgtactctgaaccccaccccattggcacccgttacctcacccgtcccctgtaa

SEQ ID NO: 1554 - DNA, 2211 bp, Artificial Sequence
  Description of Artificial Sequence: Synthetic polynucleotide
atggctgccgatggttatcttccagattggctcgaggacaacctctctgagggcattcgcgagtggtgggacttgaaacctggagccccgaagcccaaagccaaccagcaaaagcaggacgacggccggggtctggtgcttcctggctacaagtacctcggacccttcaacggactcgacaagggggagcccgtcaacgcggcggacgcagcggccctcgagcacgacaaggcctacgaccagcagctcaaagcgggtgacaatccgtacctgcggtataaccacgccgacgccgagtttcaggagcgtctgcaagaagatacgtcttttgggggcaacctcgggcgagcagtcttccaggccaagaagcgggttctcgaacctctcggtctggttgaggaaggcgctaagacggctcctggaaagaaacgtccggtagagcagtcaccacaagagccagactcctcctcgggcatcggcaagacaggccagcagcccgctaaaaagagactcaattttggtcagactggcgactcagagtcagtccccgacccacaacctctcggagaacctccagcaacccccgctgctgtgggacctactacaatggcttcaggcggtggcgcaccaatggcagacaataacgaaggtgccgacggagtgggtaatgcctcaggaaattggcattgcgattccacatggctgggcgactgagtcatcaccaccagcacccgcacctgggccttgcccacctacaataaccacctctacaagcaaatctccagtgcttcaacgggggccagcaacgacaaccactacttcggctacagcaccccctgggggtattttgatttcaacagattccactgccacttttcaccacgtgactggcagcgactcatcaacaacaattggggattccggcccaagagactcaacttcaaactcttcaacatccaagtcaaggaggtcacgcagaatgaaggcaccaagaccatcgccaataacctcaccagcaccatccaggtgtttacggactcggagtaccagctgccgtacgttctcggctctgcccaccagggctgcctgcctccgttcccggcggacgtgttcatgattccccagtacggctacctaacgctcaacaatggcagccaggcagtgggacggtcatccttttactgcctggaatactttccttcgcagatgctgagaaccggcaacaacttccagtttacttacaccttcgaggacgtgcctttccacagcagctacgcccacagccagagcttggaccggctgatgaatcctctgattgaccagtacctgtactacttgtctcggactcaaacaacaggaggcacggcaaatacgcagactctgggcttcagccaaggtgggcctaatacaatggccaatcaggcaaagaactggctgccaggaccctgttaccgccaacaacgcgtctcaacgacaaccgggcaaaacaacaatagcaactttgcctggactgctgggaccaaataccatctgaatggaagaaattcattggctaatcctggcatcgctatggcaacacacaaagacgacaaggagcgtttttttcccagtaacgggatcctgatttttggcaaacaaaatgctgccagagacaatgcggattacagcgatgtcatactcaccagcgaggaagaaatcaaaaccactaaccctgtggctacagaggaatacggtatcgtggcagataacttgcagcagcaaaacacggctcctcaaattggaactgtcaacagccagggggccttacccggtatggtctggcagaaccgggacgtgtacctgcagggtcccatctgggccaagattcctcacacggacggcaacttccacccgtctccgctgatgggcggctttggcctgaaacatcctccgcctcagatcctgatcaagaacacgcctgtacctgcggatcctccgaccaccttcaaccagtcaaagctgaactctttcatcacgcaatacagcaccggacaggtcagcgtggaaattgaatgggagctgcagaaggaaaacagcaagcgctggaaccccgagatccagtacacctccaactactacaaatctacaagtgtggactttgctgttaatacagaaggcgtgtactctgaaccccaccccattggcacccgttacctcacccgtcccctgtaa

SEQ ID NO: 1555 - DNA, 2211 bp, Artificial Sequence
  Description of Artificial Sequence: Synthetic polynucleotide
atggctgccgatggttatcttccagattggctcgaggacactctctctgaaggaataagacagtggtggaagctcaaacctggcccaccaccaccaaagcccgcagagcggcataaggacgacagcaggggtcttgtgcttcctgggtacaagtacctcggacccttcaacggactcgacaagggagagccggtcaacgaggcagacgccgcggccctcgagcacgacaaagcctacgaccggcagctcgacagcggagacaacccgtacctcaagtacaaccacgccgacgcggagtttcaggagcgccttaaagaagatacgtcttttgggggcaacctcgggcgagcagtcttccaggccaagaagagggttctcgaaccttttggtctggttgaggaaggtgctaagacggctcctggaaagaaacgtccggtagagcagtcgccacaagagccagactcctcctcgggcattggcaagacaggccagcagcccgctaaaaagagactcaattttggtcagactggcgactcagagtcagtccccgacccacaacctctcggagaacctccagcaacccccgctgctgtgggacctactacaatggcttcaggcggtggcgcaccaatggcagacaataacgaaggcgccgacggagtgggtaatgcctcaggaaattggcattgcgattccacatggctgggcgacagagtcatcaccaccagcacccgaacatgggccttgcccacctataacaaccacctctacaagcaaatctccagtacttcaacgggggccagtaacgacaaccactacttcggctacagcaccccctgggggtattttgacttcaacagattccactgccacttctcaccacgtgactggcagcgactcatcaacaacaactggggattccggcctaagcgactcaacttcaagctcttcaacattcaggtcaaagaggttacggacaacaatggagtcaagaccatcgccaataaccttaccagcacggtccaggtcttcacggactcggagtaccagttgccgtacgtcctcggctctgcgcaccagggctgcctgcctccgttcccggcggacgtgttcatgattccgcagtacggctacctaacgctcaacaatggcagccaggcagtgggacggtcatccttttactgcctggaatatttcccatcgcagatgctgagaacgggcaacaactttaccttcagctacacttttgaggacgttcctttccacagcagctacgctcacagccagagtctggaccgtctcatgaatcctctgattgaccagtacctgtactacttgtctcggactcaaacaacaggaggcacggcaaatacgcagactctgggcttcagccaaggtgggcctaatacaatggccaatcaggcaaagaactggctgccaggaccctgttaccgccaacaacgcgtctcaacgacaaccggacaaaacaacaatagcaactttgcctggactgctgggaccaaataccatctgaatggaagaaattcattggctaatcctggcatcgctatggcaacacacaaagacgacaaggagcgtttttttcccagtaacgggatcctgatttttggcaaacaaaatgctgccagagacaatgcggattacagcgatgtcatgctcaccagcgaggaagaaatcaaaaccactaaccctgtggctacagaggaatacggtatcgtggcagataacttgcagcagcaaaacacggctcctcaaattggaactgtcaacagccagggggccttacccggtatggtctggcagaaccgggacgtgtacctgcagggtcccatctgggccaagattcctcacacggacggcaacttccacccgtctccgctgatgggcggctttggcctgaaacatcctccgcctcagatcctgatcaagaacacgcctgtacctgcggatcctccgaccaccttcaaccagtcaaagctgaactctttcatcacgcaatacagcaccggacaggtcagcgtggaaattgaatgggagctgcagaaggaaaacagcaagcgctggaaccccgagatccagtacacctccaactactacaaatctacaagtgtggactttgctgttaatacagaaggcgtgtactctgaaccccaccccattggcacccgttacctcacccgtcccctgtaa

SEQ ID NO: 1556 - DNA, 2208 bp, Artificial Sequence
  Description of Artificial Sequence: Synthetic polynucleotide
atggctgccgatggttatcttccagattggctcgaggacaacctctctgagggcattcgcgagtggtgggacttgaaacctggagccccgaagcccaaagccaaccagcaaaagcaggacgacggccggggtctggtgcttcctggctacaagtacctcggacccttcaacggactcgacaagggggagcccgtcaacgcggcggatgcagcggccctcgagcacgacaaggcctacgaccggcagctcgacagcggagacaacccgtacctgcggtataaccacgccgacgcggagtttcaggagcgccttaaagaagatacgtcttttgggggcaacctcgggcgagcagtcttccaggccaagaagagggttctcgaaccttttggtctggttgaggaaggtgctaagacggctcctggaaagaaacgtccggtagagcagtcgccacaagagccagactcctcctcgggcattggcaagacaggccagcagcccgctaaaaagagactcaattttggtcagactggcgactcagagtcagtccccgacccacaacctctcggagaacctccagcaacccccgctgctgtgggacctactacaatggcttcaggcggtggcgcaccaatggcagacaataacgaaggcgccgacggagtgggtaatgcctcaggaaattggcattgcgattccacatggctgggcgacagagtcatcaccaccagcacccgcacctgggccttgcccacctacaataaccacctctacaagcaaatctccagtgcttcaacgggggccagcaacgacaaccactacttcggctacagcaccccctgggggtattttgactttaacagattccactgccacttttcaccacgtgactggcaaagactcatcaacaacaactggggattccggcccaagagactcaacttcaagctcttcaacatccaggtcaaggaggtcacgcagaatgaaggcaccaagaccatcgccaataaccttaccagcacgattcaggtctttacggactcggaataccagctcccgtacgtcctcggctctgcgcaccagggctgcctccctccgttcccggcggacgtgttcatgattccgcagtacggctacctaacactcaacaacggtagtcaggccgtgggacgctcctccttctactgcctggaatactttccttcgcagatgctgagaaccggcaacaacttccagtttacttacaccttcgaggacgtgcctttccacagcagctacgcccacagccagagcttggaccggctgatgaatcctctgattgaccagtacctgtactacttgtctcggactcaaacaacaggaggcacggcaaatacgcagactctgggcttcagccaaggtgggcctaatacaatggccaatcaggcaaagaactggctgccaggaccctgttaccgccaacaacgcgtctcaacgacaaccgggcaaaacaacaatagcaactttgcctggactgctgggaccaaataccatctgaatggaagaaattcactggctaatcctggcatcgctatggcaacacacaaagacgacaggagcgtttttttccagtaccgggatcctgattttggcaaacaaaatgctgccagagacaatgcggattacagcgatgtcatgctcaccagcgaggaagaaatcaaaaccactaaccctgtggctacagaggaatacggtatcgtggcagataacttgcagcagcaaaacacggctcctcaaattggaactgtcaacagccagggggccttacccggtatggtctggcagaaccgggacgtgtacctgcagggtcccatctgggccaagattcctcacacggacggcaacttccacccgtctccgctgatgggcggctttggcctgaaacatcctccgcctcagatcctgatcaagaacacgcctgtacctgcggatcctccgaccaccttcaaccagtcaaagctgaactctttcatcacgcaatacagcaccggacaggtcagcgtggaaattgaatgggagctgcagaaggaaaacagcaagcgctggaaccccgagatccagtacacctccaactactacaaatctacaagtgtggactttgctgttaatacagaaggcgtgtactctgaaccccaccccattggcacccgttacctcacccgtcccctgtaa

SEQ ID NO: 1557 - DNA, 2211 bp, Artificial Sequence
  Description of Artificial Sequence: Synthetic polynucleotide
atggctgccgatggttatcttccagattggctcgaggacaacctctctgagggcattcgcgagtggtgggcgctgaaacctggagccccgaagcccaaagccaaccagcaaaagcaggacgacggccggggtctggtgcttcctggctacaagtacctcggacccttcaacggactcgacaagggggagcccgtcaacgcggcggatgcagcagccctcgaacacgacaaagcttacgaccagcagctcaaggccggtgacaacccctacctcaagtataaccacgccgacgccgagtttcaggagcgtcttcaaggagatacgtcttttgggggcaacctcggacgagcagtcttccaggccaagaagcgggttctcgaacctcttggtctggttgaggaagcggctaagacggctcctggaaagaagaggcctgtagagcagtctcctcaggaaccggactcctccgcgggtattggcaaatcgggtgcacagcccgctaaaaagagactcaatttcggtcagactggcgacacagagtcagtcccagaccctcaacctctcggagaacctccagcagcgccctctggtgtgggacctaatacaatggctgcaggcggtggcgcaccaatggcagacaataacgaaggtgccgatggagtgggtagttcctcgggaaattggcattgcgattcccaatggctgggggacagagtcatcaccaccagcacccgaacctgggccctgcccacctacaacaaccacctctacaagcaaatctccagtgcttcaacgggggccagcaacgacaaccactacttcggctacagcaccccttgggggtattttgacttcaacagattccactgccacttttcaccacgtgactggcagcgactcatcaacaacaactggggattccggcctaagcgactcaacttcaagctcttcaacattcaggtcaaagaggttacggacaacaatggagtcaagaccatcgccaataaccttaccagcacggtccaggtcttcacggactcagactatcagctcccgtacgtgctcgggtcggctcacgagggctgcctccctccgttcccggcggacgtgttcatgattccgcagtacggctacctaacgctcaacaatggcagccaggcagtgggacggtcatccttttactgcctggaatactttccttcgcagatgctgagaaccggcaacaacttccagtttacttacaccttcgaggacgtgcctttccacagcagctacgctcacagccagagtctggaccgtctcatgaatcctctgattgaccagtacctgtactacttgtctcggactcaaacaacaggaggcacggcaaatacgcagactctgggcttcagccaaggtgggcctaatacaatggccaatcaggcaaagaactggctgccaggaccctgttaccgccaacaacgcgtctcaacgacaaccgggcaaaacaacaatagcaactttgcctggactgctgggaccaaataccatctgaatggaagaaattcattggctaatcctggcatcgctatggcaacacacaaagacgacaaggagcgtttttttcccagtaacgggatcctgatttttggcaaacaaaatgctgccagagacaatgcggattacagcgatgtcatgctcaccagcgaggaagaaatcaaaaccactaaccctgtggctacagaggaatacggtatcgtagcagataacttgcagcagcaaaacacggctcctcaaattggaactgtcaacagccagggggccttacccggtatggtctggcagaaccgggacgtgtacctgcagggtcccatctgggccaagattcctcacacggacggcaacttccacccgtctccgctgatgggcggctttggcctgaaacatcctccgcctcagatcctgatcaagaacacgcctgtacctgcggatcctccgaccaccttcaaccagtcaaagctgaactctttcatcacgcaatacagcaccggacaggtcagcgtggaaattgaatgggagctgcagaaggaaaacagcaagcgctggaaccccgagatccagtacacctccaactactacaaatctacaagtgtggactttgctgttaatacagaaggcgtgtactctgaaccccaccccattggcacccgttacctcacccgtcccctgtaa

SEQ ID NO: 1558 - DNA, 2211 bp, Artificial Sequence
  Description of Artificial Sequence: Synthetic polynucleotide
atggctgccgatggttatcttccagattggctcgaggacactctctctgaaggaataagacagtggtggaagctcaaacctggcccaccaccaccaaagcccgcagagcggcataaggacgacagcaggggtcttgtgcttcctgggtacaagtacctcggacccttcaacggactcgacaagggagagccggtcaacgaggcagacgccgcggccctcgagcacgacaaagcctacgaccggcagctcgacagcggagacaacccgtacctcaagtacaaccacgccgacgcggagtttcaggagcgccttaaagaagatacgtcttttgggggcaacctcgggcgagcagtcttccaggccaagaagagggttctcgaaccttttggtctggttgaggaagcggctaagacggctcctggaaagaaacgtccggtagagcagtcgccacaagagccagactcctcctcgggcattggcaagacaggccagcagcccgctaaaaagagactcaattttggtcagactggcgactcagagtcagtccccgacccacaacctctcggagaacctccagcaacccccgctgctgtgggacctactacaatggcttcaggcggtggcgcaccaatggcagacaataacgaaggcgccgacggagtgggtaatgcctcaggaaattggcattgcgattccacatggctgggcgacagagtcatcaccaccagcacccgaacatgggccttgcccacctataacaaccacctctacaagcaaatctccagtgcttcaacgggggccagcaacgacaaccactacttcggctacagcaccccctgggggtattttgacttcaacagattccactgccacttctcaccacgtgactggcagcgactcatcaacaacaactggggattccggcctaagcgactcaacttcaagctcttcaacattcaggtcaaagaggttacggacaacaatggagtcaagaccatcgccaataaccttaccagcacggtccaggtcttcacggactcagactatcagctcccgtacgtgctcgggtcggctcacgagggctgcctcccgccgttcccagcggacgttttcatgattcctcagtacggctacctaacactcaacaacggtagtcaggccgtgggacgctcctccttctactgcctggaatactttccttcgcagatgctgagaacgggcaacaactttaccttcagctacacctttgaggacgttcctttccacagcagctacgctcacagccagagtctggaccgtctcatgaatcctctgattgaccagtacctgtactacttgtctcggactcaaacaacaggaggcacggcaaatacgcagactctgggcttcagccaaggtgggcctaatacaatggccaatcaggcaaagaactggctgccaggaccctgttaccgccaacaacgcgtctcaacgacaaccgggcaaaacaacaatagcaactttgcctggactgctgggacaaaataccatctgaatggaagaaattcattggctaatcctggcatcgctatggcaacacacaaagacgacaaggagcgtttttttcccagtaacgggattctgatttttggcaaacaaaatgctgccagagacaatgcggattacagcgatgtcatgctcaccagcgaggaagaaatcaaaaccactaaccctgtggctacagaggaatacggtatcgtggcagataacttgcagcagcaaaacacggctcctcaaattggaactgtcaacagccagggggccttacccggtatggtctggcagaaccgggacgtgtacctgcagggtcccatctgggccaagattcctcacacggacggcaacttccacccgtctccgctgatgggcggctttggacttaagcacccgcctcctcagatcctcatcaaaaacacgcctgttcctgcggatcctccgaccaccttcaaccagtcaaagctgaactctttcatcacgcaatacagcaccggacaggtcagcgtggaaattgaatgggagctgcagaaggaaaacagcaagcgctggaaccccgagatccagtacacctccaactactacaaatctacaagtgtggactttgctgttaatacagaaggcgtgtactctgaaccccaccccattggcacccgttacctcacccgtcccctgtaa

SEQ ID NO: 1559 - DNA, 2211 bp, Artificial Sequence
  Description of Artificial Sequence: Synthetic polynucleotide
atggctgccgatggttatcttccagattggctcgaggacaacctctctgagggcattcgcgagtggtgggcgctgaaacctggagccccgaagcccaaagccaaccagcaaaagcaggacgacggccggggtctggtgcttcctggctacaagtacctcggacccttcaacggactcgacaaaggagagccggtcaacgcggcggacgcagcggccctcgagcacgacaaggcctacgaccagcagctcaaagcgggtgacaatccgtacctgcggtataaccacgccgacgccgagtttcaggagcgtctgcaagaagatacgtcttttgggggcaacctcgggcgagcagtcttccaggccaagaagcgggttctcgaacctctcggtctggttgaggaaggcgctaagacggctcctggaaagaaacgtccggtagagcagtcgccacaagagccagactcctcctcgggcatcggcaagacaggccagcagcccgctaaaaagagactcaattttggtcagactggcgactcagagtcagtccccgacccacaacctctcggagaacctccagcaacccccgctgctgtgggacctactacaatggcttcaggcggtggcgcaccaatggcagacaataacgaaggcgccgacggagtgggtagttcctcgggaaattggcattgcgattccacatggctgggcgacagagtcatcaccaccagcacccgcacctgggccttgcccacctacaataaccacctctacaagcaaatctccagtgcttcaacgggggccagcaacgacaaccactacttcggctacagcaccccctgggggtattttgacttcaacagattccactgccacttctcaccacgtgactggcagcgactcatcaacaacaactggggattccggcctaagcgactcaacttcaagctcttcaacattcaggtcaaagaggttacggacaacaatggagtcaagaccatcgccaataaccttaccagcacggtccaggtcttcacggactcggagtaccagttgccgtacgtcctcggctctgcgcaccagggctgcctccctccgttcccggcggacgtgttcatgattccgcagtacggctacctaacgctcaacaatggcagccaggcagtgggacggtcatccttttactgcctggaatatttcccatcgcagatgctgagaacgggcaacaactttaccttcagctacacctttgaggacgttcctttccacagcagctacgctcacagccagagtctggaccgtctcatgaatcctctgattgaccagtacctgtactacttgtctcggactcaaacaacaggaggcacggcaaatacgcagactctgggcttcagccaaggtgggcctaatacaatggccaatcaggcaaagaactggctgccaggaccctgttaccgccaacaacgcgtctcaacgacaaccgggcaaaacaacaatagcaactttgcctggactgctgggaccaaataccatctgaatggaagaaattcattggctaatcctggcatcgctatggcaacacacaaagacgacaaggagcgtttttttcccagtaacgggatcctgatttttggcaaacaaaatgctgccagagacaatgcggattacagcgatgtcatgctcaccagcgaggaagaaatcaaaaccactaaccctgtggctacagaggaatacggtatcgtggcagataacttgcagcagcaaaacacggctcctcaaattggaactgtcaacagccagggggccttacccggtatggtctggcagaaccgggatgtgtacctgcagggtcccatctgggccaagattcctcacacggacggcaacttccacccgtctccgctgatgggcggctttggcctgaaacatcctccgcctcagatcctgatcaagaacacgcctgtacctgcggatcctccgaccaccttcaaccagtcaaagctgaactctttcatcacgcaatacagcaccggacaggtcagcgtggaaattgaatgggagctgcagaaggaaaacagcaagcgctggaaccccgagatccagtacacctccaactactacaaatctacaagtgtggactttgctgttaatacagaaggcgtgtactctgaaccccaccccattggcacccgttacctcacccgtcccctgtaa

SEQ ID NO: 1560 - DNA, 2214 bp, Artificial Sequence
  Description of Artificial Sequence: Synthetic polynucleotide
atggctgccgatggttatcttccagattggctcgaggacaaccttagtgaaggaattcgcgagtggtgggcgctgaaacctggagccccgaagcccaaagccaaccagcaaaagcaggacgacggccggggtctggtgcttcctggctacaagtacctcggacccttcaacggactcgacaagggggagcccgtcaacgcggcggacgcagcggccctcgagcacgacaaggcctacgaccagcagctcaaagcgggtgacaatccgtacctgcggtataaccacgccgacgccgagtttcaggagcgtctgcaagaagatacgtcttttgggggcaacctcgggcgagcagtcttccaggccaagaagcgggttctcgaacctctcggtctggttgaggaaggcgctaagacggctcctggaaagaaacgtccggtagagcagtcgccacaagagccagactcctcctcgggcatcggcaagacaggccagcagcccgctaaaaagagactcaatttcggtcagactggcgacacagagtcagtcccagaccctcaaccaatcggagaacctcccgcagccccctcaggtgtgggatctcttacaatggcttcaggtggtggcgcaccagtggcagacaataacgaaggtgccgatggagtgggtagttcctcgggaaattggcattgcgattcccaatggctgggggacagagtcatcaccaccagcaccagaacctgggccttgcccacctacaataaccacctctacaagcaaatctccaacagcacatctggaggatcttcaaatgacaacgcctacttcggctacagcaccccctgggggtattttgactttaacagattccactgccacttttcaccacgtgactggcagcgactcatcaacaacaactggggattccgacccaagagactcaacttcaagctcttcaacatccaggtcaaggaggtcacgcagaacgaaggcaccaagaccatcgccaataacctcaccagcaccatccaggtgtttacggactcggagtaccagctgccgtacgttctcggctccgcccaccagggctgcctgcctccgttcccggcggacgtgttcatgattccccagtacggctacctaacgctcaacaacggtagtcaggccgtgggacgctcctccttctactgcctggaatactttccttcgcagatgctgagaaccggcaacaacttccagtttacttacaccttcgaggacgtgcctttccacagcagctacgcgcacagccagagcttggaccggctgatgaatcctctgattgaccagtacctgtactacttgtctcggactcaaacaacaggaggcacggcaaatacgcagactctgggcttcagccaaggtgggcctaatacaatggccaatcaggcaaagaactggctgccaggaccctgttaccgccaacaacgcgtctcaacgacaaccgggcaaaacaacaatagcaactttgcctggactgctgggaccaaataccatctgaatggaagaaattcattggctaatcctggcatcgctatggcaacacacaaagacgacaaggagcgtttttttcccagtaacgggatcctgatttttggcaaacaaaatgctgccagagacaatgcggattacagcgatgtcatgctcaccagcgaggaagaaatcaaaaccactaaccctgtggctacagaggaatacggtatcgtggcagataacttgcagcagcaaaacacggctcctcaaattggaactgtcaacagccagggggccttacccggtatggtctggcagaaccgggacgtgtacctgcagggtcccatctgggccaagattcctcacacggacggcaacttccacccgtctccgctgatgggcggctttggcctgaaacatcctccgcctcagatcctgatcaagaacacgcctgtacctgcggatcctccgaccaccttcaaccagtcaaagctgaactctttcatcacgcaatacagcaccggacaggtcagcgtggaaattgaatgggagctgcagaaggaaaacagcaagcgctggaaccccgagatccagtacacctccaactactacaaatctacaagtgtggactttgctgttaatacagaaggcgtgtactctgaaccccaccccattggcactcgttacctcacccgtcccctgtaa

SEQ ID NO: 1561 - DNA, 2211 bp, Artificial Sequence
  Description of Artificial Sequence: Synthetic polynucleotide
atggctgccgatggttatcttccagattggctcgaggacaacctctctgagggcattcgcgagtggtgggcgctgaaacctggagccccgaagcccaaagccaaccagcaaaagcaggacgacggccggggtctggtgcttcctggctacaagtacctcggacccttcaacggactcgacaagggggagcccgtcaacgcggcggatgcagcagccctcgaacacgacaaagcttacgaccagcagctcaaggccggtgacaacccctacctcaagtataaccacgccgacgccgagtttcaggagcgtcttcaaggagatacgtcttttgggggcaacctcggacgagcagtcttccaggccaagaagcgggttctcgaacctcttggtctggttgaggaagcggctaagacggctcctggaaagaagaggcctgtagagcagtctcctcaggaaccggactcctccgcgggtattggcaaatcgggtgcacagcccgctaaaaagagactcaatttcggtcagactggcgacacagagtcagtcccagaccctcaacctctcggagaacctccagcagcgccctctggtgtgggacctaatacaatggctgcaggcggtggcgcaccaatggcagacaataacgaaggtgccgatggagtgggtagttcctcgggaaattggcattgcgattcccaatggctgggggacagagtcatcaccaccagcacccgaacctgggccctgcccacctacaacaaccacctctacaagcaaatctccagtgcttcaacgggggccagcaacgacaaccactacttcggctacagcaccccttgggggtattttgacttcaacagattccactgccacttctcaccacgtgactggcagcgactcatcaacaacaactggggattccggcctaagcgactcaacttcaagctcttcaacattcaggtcaaagaggttacggacaacaatggagtcaagaccatcgccaataaccttaccagcacggtccaggtcttcacggactcggagtaccagttgccgtacgtcctcggctctgcgcaccagggctgcctccctccgttcccggcggacgtgttcatgattccgcagtacggctacctaacgctcaacaatggcagccaggcagtgggacggtcatccttttactgcctggaatatttcccatcgcagatgctgagaacgggcaacaactttaccttcagctacacctttgaggacgttcctttccacagcagctacgctcacagccagagtctggaccgtctcatgaatcctctgattgaccagtacctgtactacttgtctcggactcaaacaacaggaggcacggcaaatacgcagactctgggcttcagccaaggtgggcctaatacaatggccaatcaggcaaagaactggctgccaggaccctgttaccgccaacaacgcgtctcaacgacaaccgggcaaaacaacaatagcaactttgcctggactgctgggaccaaataccatctgaatggaagaaattcattggctaatcctggcatcgctatggcaacacacaaagacgacaaggagcgtttttttcccagtaacgggatcctgatttttgacaaacaaaatgctgccagagacaatgcggattacagcgatgtcatgctcaccagcgaggaagaaatcaaaaccactaaccctgtggctacagaggaatacggtatcgtggcagataacttgcagcagcaaaacacggctcctcaaattggaactgtcaacagccagggggccttacccggtatggtctggcagaaccgggatgtgtacctgcagggtcccatctgggccaagattcctcacacggacggcaacttccacccgtctccgctgatgggcggctttggcctgaaacatcctccgcctcagatcctgatcaagaacacgcctgtacctgcggatcctccgaccaccttcaaccagtcaaagctgaactctttcatcacgcaatacagcaccggacaggtcagcgtggaaattgaatgggagctgcagaaggaaaacagcaagcgctggaaccccgagatccagtacacctccaactactacaaatctacaagtgtggactttgctgttaatacagaaggcgtgtactctgaaccccaccccattggcacccgttacctcacccgtcccctgtaa

SEQ ID NO: 1562 - DNA, 2211 bp, Artificial Sequence
  Description of Artificial Sequence: Synthetic polynucleotide
atggctgccgatggttatcttccagattggctcgaggacactctctctgaaggaataagacagtggtggaagctcaaacctggcccaccaccaccaaagcccgcagagcggcataaggacgacagcaggggtcttgtgcttcctgggtacaagtacctcggacccttcaacggactcgacaagggagagccggtcaacgaggcagacgccgcggccctcgagcacgacaaagcctacgaccggcagctcgacagcggagacaacccgtacctcaagtacaaccacgccgacgcggagtttcaggagcgccttaaagaagatacgtcttttgggggcaacctcggacgagcagtcttccaggcgaaaaagagggttcttgaacctctgggcctggttgaggaacctgttaagacggctccgggaaaaaagaggccggtagagcactctcctgtggagccagactcctcctcgggaaccggaaaggcgggccagcagcctgcaagaaaaagattgaattttggtcagactggcgactcagagtcagtccccgacccacaacctctcggagaacctccagcaacccccgctgctgtgggacctaatacgatggctacaggcagtggcgcaccaatggcagacaataacgagggcgccgacggagtgggtaattcctcgggaaattggcattgcgattccacatggatgggcgacagagtcatcaccaccagcaccagaacctgggccctgcccacttacaacaaccatctctacaagcaaatctccagtgcttcaacgggggccagcaacgacaaccactacttcggctacagcaccccctgggggtattttgacttcaacagattccactgccacttctcaccacgtgactggcagcgactcatcaacaacaactggggattccggcctaagcgactcaacttcaagctcttcaacattcaggtcaaagaggttacggacaacaatggagtcaagaccatcgccaataaccttaccagcaccatccaggtctttacggactcggaataccagctgccgtacgttctcggctctgcccaccagggctgcctgcctccgttcccggcggacgtgttcatgattccccagtacggctacctaacactcaacaacggtagtcaggccgtgggacgctcctccttctactgcctggaatatttcccatcgcagatgctgagaacgggcaacaactttaccttcagctacacctttgaggacgttcctttccacagcagctacgctcacagccagagtctggaccgtctcatgaatcctctgattgaccagtacctgtactacttgtctcggactcaaacaacaggaggcaaggcaaatacgcagactctgggcttcagccaaggtgggcctaatacaatggccaatcaggcaaagaactggctgccaggaccctgttaccgccaacaacgcgtctcaacgacaaccgggcaaaacaacaatagcaactttgcctggactgctgggaccaaataccatctgaatggaagaaattcattggctaatcctggcatcgctatggcaacacacaaagacgacaaggagcgtttttttcccagtaacgggatcctgatttttggcaaacaaaatgctgccagagacaatgcggattacagcgatgtcatgctcaccagcgaggaagaaatcaaaaccactaaccctgtggctacagaggaatacggtatcgtggcagataacttgcagcagcaaaacacggctcctcaaattggaactgtcaacagccagggggccttacccggtatggtctggcagaaccgggacgtgtacctgcagggtcccatctgggccaagattcctcacacggacggcaacttccacccgtctccgctgatgggcggctttggcctgaaacatcctccgcctcagatcctgatcaagaacacgcctgtacctgcggatcctccgaccaccttcaaccagtcaaagctgaactctttcatcacgcaatacagcaccggacaggtcagcgtggaaattgaatgggagctgcagaaggaaaacagcaagcgctggaaccccgagatccagtacacctccaactactacaaatctacaagtgtggactttgctgttaatacagaaggcgtgtactctgaaccccaccccattggcacccgttacctcacccgtcccctgtaa

SEQ ID NO: 1563 - DNA, 2211 bp, Artificial Sequence
  Description of Artificial Sequence: Synthetic polynucleotide
atggctgccgatggttatcttccagattggctcgaggacaacctctctgagggcattcgcgagtggtgggcgctgaaacctggagccccgaagcccaaagccaaccagcaaaagcaggacgacggccggggtctggtgcttcctggctacaagtacctcggacccttcaacggactcgacaagggggagcccgtcaacgcggcggacgcagcggccctcgagcacgacaaggcctacgaccagcagctcaaagcgggtgacaatccgtacctgcggtataaccacgccgacgccgagtttcaggagcgtctgcaagaagatacgtcttttgggggcaacctcgggcgagcagtcttccaggccaagaagcgggttctcgaaccttttggtctggttgaggaaggtgctaagacggctcctggaaagaaacgtccggtagagcagtcgccacaagagccagactcctcctcgggcatcggcaagacaggccagcagcccgctaaaaagagactcaattttggtcagactggcgactcagagtcagtccccgacccacaacctctcggagaacctccagcaacccccgctgctgtgggacctactacaatggcttcaggcggtggcgcaccaatggcggacaataacgaaggcgccgacggagtgggtaatgcctcaggaaattggcattgcgattccacatggctgggcgacagagtcatcaccaccagcacccgcacctgggccttgcccacctacaataaccacctctacaagcaaatctccagtgcttcaacgggggccagcaacgacaaccactacttcggctacagcaccccctgggggtattttgacttcaacagattccactgccacttttcaccacgtgactggcaaagactcatcaacaacaactggggattccggcctaagcgactcaacttcaagctcttcaacattcaggtcaaagaggttacggacaacaatggagtcaagaccatcgccaataaccttaccagcacggtccaggtcttcacggactcggagtaccagttgccgtacgtcctcggctctgcgcaccagggctgcctccctccgttcccggcggacgtgttcatgattccgcagtacggctacctaacgctcaacaatggcagccaggcagtgggacggtcatccttttactgcctggaatatttcccatcgcagatgctgagaacgggcaacaactttaccttcagctacacctttgaggacgttcctttccacagcagctacgctcacagccagagtctggaccgtctcatgaatcctctgattgaccagtacctgtactacttgtctcggactcaaacaacaggaggcacgggaaatacgcagactctgggcttcagccaaggtgggcctaatacaatggccaatcaggcaaagaactggctgccaggaccctgttaccgccaacaacgcgtctcaacgacaaccgggcaaaacaacaatagcaactttgcctggactgctgggaccaaataccatctgaatggaagaaattcattggctaatcctggcatcgctatggcaacacacaaagacgacaaggagcgtttttttcccagtaacgggatcctgatttttggcaaacaaaatgctgccagagacaatgcggattacagcgatgtcatgctcaccagcgaggaagaaatcaaaaccactaaccctgtggctacagaggaatacggtatcgtggcagataacttgcagcagcaaaacacggctcctcaaattggaactgtcaacagccagggggccttacccggtatggtctggcagaaccgggacgtgtacctgcagggtcccatctgggccaagattcctcacacggacggcaacttccacccgtctccgctgatgggcggctttggcctgaaacatcctccgcctcagatcctgatcaagaacacgcctgtacctgcggatcctccgaccaccttcaaccagtcaaagctgaactctttcatcacgcaatacagcaccggacaggtcagcgtggaaattgaatgggagctgcagaaggaaaacagcaagcgctggaaccccgagatccagtacacctccaactactacaaatctacaagtgtggactttgctgttaatacagaaggcgtgtactctgaaccccaccccattggcacccgttacctcacccgtcccctgtaa

SEQ ID NO: 1564 - DNA, 2211 bp, Artificial Sequence
  Description of Artificial Sequence: Synthetic polynucleotide
atggctgccgatggttatcttccagattggctcgaggacaacctctctgagggcattcgcgagtggtgggacttgaaacctggagccccgaaacccaaagccaaccagcaaaagcaggacgacggccggggtctggtgcttcctggctacaagtacctcggacccttcaacggactcgacaagggggagcccgtcaacgcggcggacgcagcggccctcgagcacgacaaggcctacgaccagcagctcaaagcgggtgacaatccgtacctgcggtataaccacgccgacgccgagtttcaggagcgtctgcaagaagatacgtcttttgggggcaacctcgggcgagcagtcttccaggccaagaagcgggttctcgaacctctcggtctggttgaggaaggcgctaagacggctcctggaaagaagaggcctgtagagcagtcgccacaagagccagactcctcctcgggcatcggcaagacaggccagcagcccgctaaaaagagactcaattttggtcagactggcgactcagagtcagtccccgatccacaacctctcggagaacctccagcaacccccgctgctgtgggacctactacaatggcttcaggcggtggcgcaccaatggcagacaataacgaaggcgccgacggagtgggtagttcctcgggaaattggcattgcgattccacatggctgggcgacagagtcatcaccaccagcacccgaacatgggccttgcccacctataacaaccacctctacaagcaaatctccagtgcttcaacgggggccagcaacgacaaccactacttcggctacagcaccccctgggggtattttgacttcaacagattccactgccacttctcaccacgtgactggcagcgactcatcaacaacaactggggattccggcctaagcgactcaacttcaagctcttcaacatccaggtcaaggaggtcacgcagaatgaaggcaccaagaccatcgccaataacctcaccagcaccatccaggtgtttacggactcggagtaccagcttccgtacgtcctcggctctgcgcaccagggctgcctccctccgttcccggcggacgtgttcatgattccgcagtacggctacctaacgctcaacaatggcagccaggcagtgggacggtcatccttttactgcctggaatatttcccatcgcagatgctgagaacgggcaacaactttaccttcagctacacctttgaggacgttcctttccacagcagctacgcgcacagccagagcttggaccggctgatgaatcctctgattgaccagtacctgtactacttgtctcggactcaaacaacaggaggcacggcaaatacgcagactctgggcttcagccaaggtgggcctaatacaatggccaatcaggcaaagaactggctgccaggaccctgttaccgccaacaacgcgtctcaacgacaaccgggcaaaacaacaatagcaactttgcctggactgctgggaccaaataccatctgaatggaagaaattcattggctaatcctggcatcgctatggcaacacacaaagacgacaaggagcgtttttttcccagtaacgggatcctgatttttggcaaacaaaatgctgccagagacaatgcggattacagcgatgtcatgctcaccagcgaggaagaaatcaaaaccactaaccctgtggctacagaggaatacggtatcgtggcagataacttgcagcagcaaaacacggctcctcaaattggaactgtcaacagccagggggccttacccggtatggtctggcagaaccgggacgtgtacctgcagggtcccatctgggccaagattcctcacacggacggcaacttccacccgtctccgctgatgggcggctttggcctgaaacatcctccgcctcagatcctgatcaagaacacgcctgtacctgcggatcctccgaccaccttcaaccagtcaaagctgaactctttcatcacgcaatacagcaccggacaggtcagcgtggaaattgaatgggagctgcagaaggaaaacagcaagcgctggaaccccgagatccagtacacctccaactactacaaatctacaagtgtggactttgctgttaatacagaaggcgtgtactctgaaccccaccccattggcacccgttacctcacccgtcccctgtaa

SEQ ID NO: 1565 - DNA, 2211 bp, Artificial Sequence
  Description of Artificial Sequence: Synthetic polynucleotide
atggctgccgatggttatcttccagattggctcgaggacaacctctctgagggcattcgcgagtggtgggcgctgaaacctggagccccgaagcccaaagccaaccagcaaaagcaggacgacggccggggtctggtgcttcctggctacaagtacctcggacccttcaacggactcgacaagggggagcccgtcaacgcggcggatgcagcggccctcgagcacgacaaggcctacgaccagcagctcaaagcgggtgacaatccgtacctgcggtataaccacgccgacgccgagtttcaggagcgtctgcaagaagatacgtcttttgggggcaacctcgggcgagcagtcttccaggccaagaagcgggttctcgaacctctcggtctggttgaggaaggcgctaagacggctcctggaaagaaacgtccggtagagcagtcgccacaagagccagactcctcctcgggcatcggcaagacaggccagcagcccgctaaaaagagactcaattttggtcagactggcgactcagagtcagtccccgacccacaacctctcggagaacctccagcaacccccgctgctgtgggacctactacaatggctgcaggcggtggcgcaccaatggcagacaataacgaaggcgccgacggagtgggtagttcctcgggaaattggcattgcgattccacatggatgggcgacagagtcatcaccaccagcacccgaacctgggccttgcccacctataacaaccatctctacaagcaaatctccagtgcttcaacgggggccagcaacgacaaccactacttcggctacagcaccccctgggggtattttgacttcaacagattccactgccacttctcaccacgtgactggcagcgactcatcaacaacaactggggattccggcccaagagactcagcttcaagctcttcaacatccaggtcaaggaggtcacgcagaatgaaggcaccaagaccatcgccaataacctcaccagcaccatccaggtgtttacggactcggagtaccagctgccgtacgtcctcggctctgcgcaccagggctgcctccctccgttcccggcggacgtgttcatgattccgcagtacggctacctaacgctcaacaatggcagccaggcagtgggacggtcatccttttactgcctggaatatttcccatcgcagatgctgagaacgggcaacaactttaccttcagctacacctttgaggacgttcctttccacagcagctacgctcacagccagagcttggaccggctgatgaatcctctgattgaccagtacctgtactacttgtctcggactcaaacaacaggaggcacggcaaatacgcagactctgggtttcagccaaggtgggcctaatacaatggccaatcaggcaaagaactggctgcaaggaccctgttaccgccaacaacgcgtctcaacgacaaccgggcaaaacaacaatagcaactttgcctggactgctgggaccaaataccatctgaatggaagaaattcattggctaatcctggcatcgctatggcaacacacaaagacgacaaggagcgtttttttcccagtaacgggatcctgatttttggcaaacaaaatgctgccagagacaatgcggattacagcgatgtcatgctcaccagcgaggaagaaatcaaaaccactaaccctgtggctacagaggaatacggtatcgtggcagataacttgcagcagcaaaacacggctcctcaaattggaactgtcaacagccagggggccttacccggtatggtctggcagaacctggacgtgtacctgcagggtcccatctgggccaagattcctcacacggacggcaacttccacccgtctccgctgatgggcggctttggcctgaaacatcctccgcctcagatcctgatcaagaacacgcctgtacctgcggatcctccgaccaccttcaaccagtcaaagctgaactctttcatcacgcaatacagcaccggacaggtcagcgtggaaattgaatgggagctgcagaaggaaaacagcaagcgctggaaccccgagatccagtacacctccaactactacaaatctacaagtgtggactttgctgttaatacagaaggcgtgtactctgaaccccaccccattggcacccgttacctcacccgtcccctgtaa

SEQ ID NO: 1566 - DNA, 2214 bp, Artificial Sequence
  Description of Artificial Sequence: Synthetic polynucleotide
atggctgccgatggttatcttccagattggctcgaggacaacctctctgagggcattcgcgagtggtgggcgctgaaacctggagccccgaagcccaaagccaaccagcaaaagcaggacgacggccggggtctggtgcttcctggctacaagtacctcggacccttcaacggactcgacaagggagagcccgtcaacgcggcggacgcagcggccctcgagcacgacaaggcctacgaccagcagctcaaagcgggtgacaatccgtacctgcggtataaccacgccgacgccgagtttcaggagcgtctgcaagaagatacgtcttttgggggcaacctcgggcgagcagtcttccaggccaagaagcgggttctcgaacctctcggtctggttgaggaaggcgctaagacggctcctggaaagaagagaccggtagagccatcaccccagcgttctccagactcctcctcgggcatcggcaagacaggccagcagcccgctaaaaagagactcaattttggtcagactggcgactcagagtcagtccccgacccacaacctctcggagaacctccagcaacccccgctgctgtgggacctactacaatggcttcaggtggtggcgcaccaatggcagacaataacgaaggcgccgacggagtgggtaatgcctcaggaaattggcattgcgattcccaatggctgggcgacagagtcatcaccaccagcacccgaacatgggccttgcccacctataacaaccacctctacaagcaaatctccagtgcttcaacgggggccagcaacgacaaccactacttcggctacagcaccccctgggggtattttgacttcaacagattccactgccacttttcaccacgtgactggcagcgactcatcaacaacaactggggattccggcctaagcgactcaacttcaagctcttcaacattcaggtcaaagaggttacggacaacaatggagtcaagaccatcgccaataaccttaccagcacggtccaggtcttcacggactcagactatcagctcccgtacgtgctcgggtcggctcacgagggctgcctcccgccgttcccagcggacgttttcatgattccccagtacggctacctaacactcaacaacggtagtcaggccgtgggacgctcctccttctactgcctggaatactttccttcgcagatgctgagaaccggcaacaacttccagtttacttacaccttcgaggacgtgcctttccacagcagctacgctcacagccagagcttggaccggctgatgaatcctctgattgaccagtacctgtactacttgtctcggactcaaacaacaggaggcacggcaaatacgcagactttgggcttcagccaaggtgggcctaatacaatggccaatcaggcaaagaactgggtgccaggaccctgttaccgccaacaacgggtttcaacggcaaccgggcaaaacaacaatagcaactttgcctggactgctgggaccaaataccatctgaaaggaagaaattcattggctaatcctggcatcgctatggcaacacacaaagacgacaaggagcgtttttttcccagtaacgggatcctgatttttggcaaacaaaatgctgccagagacaatgcggattacagcgatgtcatgctcaccagcgaggaagaaatcaaaaccactaaccctgtggctacagaggaatacggtatcgtggcagataacttgcagcagcaaaacacggctcctcaaattggaactgtcaacagccagggggccttacccggtatggtctggcagaaccgggacgtgtacctgcagggtcccatctgggccaagattcctcacacggacggcaacttccacccgtctccgctgatgggcggctttggcctgaaacatcctccgcctcagatcctgatcaagaacacgcctgtacctgcggatcctccgaccaccttcaaccagtcaaagctgaactctttcatcacgcaatacagcaccggacaggtcagcgtggaaattgaatgggagctgcagaaggaaaacagcaaacgctggaacccagagattcaatacacttccaactactacaaatctacaagtgtggactttgctgttaatacagaaggcgtgtactctgaaccccaccccattggcacccgttacctcacccgtcccctgtaa

SEQ ID NO: 1567 - DNA, 2214 bp, Artificial Sequence
  Description of Artificial Sequence: Synthetic polynucleotide
  misc_feature (676)..(676): n is a, c, g, or t
  misc_feature (697)..(697): n is a, c, g, or t
  misc_feature (715)..(715): n is a, c, g, or t
  misc_feature (748)..(748): n is a, c, g, or t
  misc_feature (750)..(750): n is a, c, g, or t
  misc_feature (757)..(757): n is a, c, g, or t
  misc_feature (763)..(763): n is a, c, g, or t
atggctgccgatggttatcttccagattggctcgaggacactctctctgaaggaataagacagtggtggaagctcaaacctggcccaccaccaccaaagcccgcagagcggcataaggacgacagcaggggtcttgtgcttcctgggtacaagtacctcggacccttcaacggactcgacaagggagagccggtcaacgaggcagacgccgcggccctcgagcacgacaaagcctacgaccggcagctcgacagcggagacaacccgtacctcaagtacaaccacgccgacgcggagtttcaggagcgccttaaagaagatacgtcttttgggggcaacctcggacgagcagtcttccaggcgaaaaagagggttcttgaacctctcggtctggttgaggaaggcgctaagacggctcctggaaagaaacgtccggtagagcagtcgccacaagagccagactcctcctcgggcatcggcaagacaggccagcagcccgctaaaaagagactcaattttggtcagactggcgactcagagtcagtccccgacccacaacctctcggagaacctccagcaacgccctctggtgtgggacctaatacaatggctgcaggcggtggcgctccaatggcagacaataacgaaggcgccgacggagtgggtagttcctcangaaattggcattgcgattccncatggctgggcgacagantcatcaccaccagcacccgaacctgggccctgncnacctacnacaacnacctctacaagcaaatctccaacagcacatctggaggagccaccaacgacaacacctacttcggctacagcaccccctgggggtattttgactttaacagattccactgccacttttcaccacgtgactggcagcgactcatcaacaacaactggggattccggcctaagcgactcaacttcaagctcttcaacatccaggtcaaggaggtcacgcagaatgaaggcaccaagaccatcgccaataacctcaccagcaccatccaggtgtttacggactcggagtaccagctgccgtacgttctcggctctgcccaccagggctgcctgcctccgttcccggcggacgtgttcatgattccccagtacggctacctaacactcaacaacggtagtcaggccgtgggacgctcctccttctactgcctggaatactttccttcgcagatgctgagaaccggcaacaacttccagtttacttacaccttcgaggacgtgcctttccacagcagctacgcccacagccagagcttggaccggctgatgaatcctctgattgaccagtacctgtactacttgtctcggactcaaacaacaggaggcacggcaaatacgcagactctgggcttcagccaaggtgggcctaatacaatggccaatcaggcaaagaactggctgccaggaccctgttaccgccaacaacgcgtctcaacgacaaccgggcaaaacaacaatagcaactttgcctggactgctgggaccaaataccatctgaatggaagaaattcattggctaatcctggcatcgctatggcaacacacaaagacgacaaggagcgtttttttcccagtaacgggatcctgatttttggcaaacaaaatgctgccagagacaatgcggattacagcgatgtcatgctcaccagcgaggaagaaatcaaaaccactaaccctgtggctacagaggaatacggtatcgtggcagataacttgcagcagcaaaacacggctcctcaaattggaactgtcaacagccagggggccttacccggtatggtttggcagaaccgggacgtgtacctgcagggtcctatctgggccaagattcctcacacggacggaaactttcatccctcgccgctgatgggaggctttggactgaaacacccgcctcctcagatcctgattaagaatacacctgttcccgcggatcctccaactaccttcagtcaagctaagctggcgtcgttcatcacgcaatacagcacaggacaagtgagtgtggaaattgaatgggagctgcagaaagaaaacagcaagcgctggaatcccgaagtgcagtacacatccaattatgcaaaatctgccaacgttgattttactgtggacaacaatggactttatactgagcctcgccccattggcacccgttaccttacccgtcccctgtaa

SEQ ID NO: 1568 - DNA, 2214 bp, Artificial Sequence
  Description of Artificial Sequence: Synthetic polynucleotide
atggctgccgatggttatcttccagattggctcgaggacaacctctctgagggcattcgcgagtggtgggacttgaaacctggagccccgaagcccaaagccaaccagcaaaagcaggacgacggccggggtctggtgcttcctggctacaagtacctcggacccttcaacggactcgacaagggggagcccgtcaacgcggcggacgcagcggccctcgagcacgacaaggcctacgaccagcagctcaaagcgggtgacaatccgtacctgcggtataaccacgccgacgccgagtttcaggagcgtctgcaagaagatacgtcttttgggggcaacctcgggcgagcagtcttccaggccaagaagcgggttctcgaacctctcggtctggttgaggaaggcgctaagacggctcctggaaagaagagaccggtagagccatcaccccagcgttctccagactcctctacgggcatcggcaagaaaggccagcagcccgcgaaaaagagactcaactttgggcagactggcgactcagagtcagtgcccgaccctcaaccaatcggagaaccccccgcaggcccctctggtgtgggatctcttacaatggcttcaggtggtggcgcaccagtggcagacaataacgaaggtgccgatggagtgggtagttcctcgggaaattggcattgcgattcccaatggctgggggacagagtcatcaccaccagcacccgaacatgggccttgcccacctataacaaccacctctacaagcaaatctccagtgcttcaacgggggccagcaacgacaaccactacttcggctacagcaccccctgggggtattttgactttaacagattccactgccacttctcaccacgtgactggcagcgactcatcaacaacaactggggattccggcccaagagactcaacttcaagctcttcaacatccaggtcaaggaggtcacggacaatgatggagtcaagaccatcgccaataaccttaccagcacgattcaggtctttacggactcggaataccagttgccgtacgtcctcggctctgcgcaccagggctgcctgcctccgttcccggcggacgtgttcatgattccgcagtacggctacctaacgctcaacaatggcagccaggcagtgggacggtcatccttttactgcctggaatatttcccatcgcagatgctgagaacgggcaacaactttaccttcagctacacttttgaggacgttcctttccacagcagctacgctcacagccagagtctggaccgtctcatgaatcctctgattgaccagtacctgtactacttgtctcggactcaaacaacaggaggcacggcaaatacgcagactctgggcttcagccaaggtgggcctaatacaatggccaatcacgcaaagaactggctgccaggaccctgttaccgccaacaacgcgtctcaacgacaaccggacaaaacaacaatagcaactttgcctggactgctgggaccaaataccatctgaatggaagaaattcattggctaatcctggcatcgctatggcaacacacaaagacgacaaggagcgtttttttcccagtaacgggatcctgatttttggcaaacaaaatgctgccagagacaatgcggattacagcgatgtcatgctcaccagcgaggaagaaatcaaaaccactaaccctgtggctacagaggaatacggtatcgtggcagataacttgcagcagcaaaacacggctcctcaaattggaactgtcaacagccagggggccttacccggtatggtctggcagaaccgggacgtgtacctgcagggtcccatctgggccaagattcctcacacggacggcaacttccacccgtctccgctgatgggcggctttggcctgaaacatcctccgcctcagatcctgatcaagaacacgcctgtacctgcggatcctccgaccaccttcaaccagtcaaagctgaactctttcatcacgcaatacagcaccggacaggtcagcgtggaaattgaatgggagctgcagaaggaaaacagcaagcgctggaaccccgagatccagtacacctccaactactacaaatctacaagtgtggactttgctgttaatacagaaggcgtgtactctgaaccccaccccattggcacccgttacctcacccgtcccctgtaa

SEQ ID NO: 1569 - DNA, 2211 bp, Artificial Sequence
  Description of Artificial Sequence: Synthetic polynucleotide
atggctgccgatggttatcttccagattggctcgaggacactctctctgaaggaataagacagtggtggaagctcaaacctggcccaccaccaccaaagcccgcagagcggcacaaggacgacagcaggggtcttgtgcttcctgggtacaagtacctcggacccttcaacggactcgacaagggagagccggtcaacgaggcagacgccgcggccctcgagcacgacaaagcctacgaccggcagctcgacagcggagacaacccgtacctcaagtacaaccacgccgacgcggagtttcaggagcgccttaaagaagatacgtcttttgggggcaacctcggacgagcagtcttccaggcgaaaaagagggttcttgaacctctgggcctggttgaggaacctgttaagacggctccgggaaaaaagaggccggtagagcactctcctgtggagccagactcctcctcgggaaccggaaaggcgggccagcagcctgctaaaaagagactcaattttggtcagactggcgactcagagtcagtccccgacccacaacctctcggagaacctccagcaacccccgctgctgtgggacctactacaatggcttcaggtggtggcgcaccaatggcagacaataacgaaggcgccgacggagtgggtaatgcctcaggaaattggcattgcgattccacatggctgggcgacagagtcatcaccaccagcacccgcacctgggccttgcccacctacaataaccacctctacaagcaaatctccagtgcttcaacgggggccagcaacgacaaccactacttcggctacagcaccccctgggggtattttgacttcaacagattccactgccacttctcaccacgtgactggcagcgactcatcaacaacaactggggattccggcccaagagactcaacttcaaactcttcaacatccaagtcaaggaggtcacgcagaatgaaggcaccaagaccatcgccaataacctcaccagcaccatccaggtgtttacggactcggagtaccagctgccgtacgttctcggctctgcccaccagggctgcctgcctccgttcccggcggacgtgttcatgattccccagtacggctacctaacactcaacaacggtagtcaggccgtgggacgctcctccttctactgcctggaatactttccttcgcagatgctgagaaccggcaacaacttccagtttacttacaccttcgaggacgtgcctttccacagcagctacgcgcacagccagagcttggaccggctgatgaatcctctgattgaccagtacctgtactacttgtctcggactcaaacaacaggaggcacggcaaatacgcagactctgggcttcagccaaggtgggcctaatacaatggccaatcaggcaaagaactggctgccaggaccctgttaccgccaacaacgcgtctcaacgacaaccgggcaaaacaacaatagcaactttgcctggactgctgggaccaaataccatctgaatggaagaaattcattggctaatcctggcatcgctatggcaacacacaaagacgacaaggagcgtttttttcccagtaacgggatcctgatttttggcaaacaaaatgctgccagagacaatgcggattacagcgatgtcatgctcaccagcgaggaagaaatcaaaaccactaaccctgtggctacagaggaatacggtatcgtggcagataacttgcagcagcaaaacacggctcctcaaattggaactgtcaacagccagggggccttacccggtatggtctggcagaaccgggacgtgtacctgcagggtcccatctgggccaagattcctcacacggacggcaacttccacccgtctccgctgatgggcggctttggcctgaaacatcctccgcctcagatcctgatcaagaacacgcctgtacctgcggatcctccgaccaccttcaaccagtcaaagctgaactctttcatcacgcaatacagcaccggacaggtcagcgtggaaattgaatgggagctgcagaaggaaaacagcaagcgctggaaccccgagatccagtacacctccaactactacaaatctacaagtgtggactttgctgttaatacagaaggcgtgtactctgaaccccaccccattggcacccgttacctcacccgtcccctgtaa

SEQ ID NO: 1570 - DNA, 2211 bp, Artificial Sequence
  Description of Artificial Sequence: Synthetic polynucleotide
atggctgccgatggttatcttccagattggctcgaggacaacctctctgagggcattcgcgagtggtgggcgctgaaacctggagccccgaagcccaaagccaaccagcaaaagcaggacgacggccggggtctggtgcttcctggctacaagtacctcggacccttcaacggactcgacaagggggagcccgtcaacgcggcggatgcagcggccctcgagcacgacaaggcctacgaccagcagctccaagcgggtgacaatccgtacctgcggtataaccacgccgacgccgagtttcaggagcgtcttcaaggagatacgtcttttgggggcaacctcggacgagcagtcttccaggccaagaagcgggttctcgaacctctcggtctggttgaggaaggcgctaagacggctcctggaaagaaacgtccggtagagcagtcgccacaagagccagactcctcctcgggcatcggcaagacaggccagcagcccgctaaaaagagactcaattttggtcagactggcgactcagagtcagtccccgacccacaacctctcggagaacctccagcaacccccgctgctgtgggacctactacaatggcttcaggcggtggcgcaccaatggcggacaataacgaaggcgccgatggagtgggtaatgcctcaggaaattggcattgcgattccacatggctgggcgacagagtcatcaccaccagcacccgcacctgggccttgcccacctacaataaccacctctacaagcaaatctccagtgcttcaacgggggccagcaacgacaaccactacttcggctacagcaccccctgggggtattttgacttcaacagattccactgccacttctcaccacgtgactggcagcgactcatcaacaacaactggggattccggcctaagcgactcaacttcaagctcttcaacattcaggtcaaagaggttacggacaacaatggagtcaagaccatcgccaataacctcaccagcaccatccaggtgtttacggactcggagtaccagctgccgtacgttctcggctctgcccaccagggctgcctgcctccgttcccggcggacgtgttcatgattccccagtacggctacctaacactcaacaacggtagtcaggccgtgggacgctcctccttctactgcctggaatactttccttcgcagatgctgagaaccggcaacaacttccagtttacttacaccttcgaggacgtgcctttccacagcagctacgcccacagccagagcttggaccggctgatgaatcctctgattgaccagtacctgtactacttgtctcggactcaaacaacaggaggcacggcaaatacgcagactctgggcttcagccaaggtgggcctaatacaatggccaatcaggcaaagaactggctgccaggaccctgttaccgccaacaacgcgtctcaacgacaaccgggcaaaacaacaatagcaactttgcctggactgctgggaccaaataccatctgaatggaagaaattcattggctaatcctggcatcgctatggcaacacacaaagacgacaaggagcgtttttttcccagtaacgggatcctgatttttggcaaacaaaatgctgccagagacaatgcggattacagcgatgtcatgctcaccagcgaggaagaaatcaaaaccactaaccctgtggctacagaggaatacggtatcgtggcagataacttgcagcagcaaaacacggctcctcaaattggaactgtcaacagccagggggccttacccggtatggtctggcagaaccgggacgtgtacctgcagggtcccatctgggccaagattcctcacacggacggcaacttccacccgtctccgctgatgggcggctttggcctgaaacatcctccgcctcagatcctgatcaagaacacgcctgtacctgcggatcctccgaccaccttcaaccagtcaaagctgaactctttcatcacgcaatacagcaccggacaggtcagcgtggaaattgaatgggagctgcagaaggaaaacagcaagcgctggaaccccgagatccagtacacctccaactactacaaatctacaagtgtggactttgctgttaatacagaaggcgtgtactctgaaccccaccccattggcacccgttacctcacccgtcccctgtaa

SEQ ID NO: 1571 - DNA, 2217 bp, Artificial Sequence
  Description of Artificial Sequence: Synthetic polynucleotide
atggctgccgatggttatcttccagattggctcgaggacactctctctgaaggaataagacagtggtggaagctcaaacctggcccaccaccaccaaagcccgcagagcggcataaggacgacagcaggggtcttgtgcttcctgggtacaagtacctcggacccttcaacggactcgacaagggggagcccgtcaacgcggcggatgcagcggccctcgagcacgacaaggcctacgaccagcagctcaaagcgggtgacaatccgtacctgcggtataaccacgccgacgcggagtttcaggagcgccttaaagaagatacgtcttttgggggcaacctcggacgagcagtcttccaggcgaaaaagagggttcttgaacctctcggtctggttgaggaaggcgctaagacggctcctggaaagaagagaccggtagagccatcaccccagcgttctccagactcctctacgggcatcggcaagaaaggccaacagcccgccagaaaaagactcaattttggtcagactggcgactcagagtcagttccagaccctcaacctctcggagaacctccagcagcgccctctggtgtgggacctaatacaatggctgcaggcggtggcgcaccaatggcagacaataacgaaggcgccgacggagtgggtagttcctcgggaaattggcattgcgattcccaatggctgggggacagagtcatcaccaccagcaccagaacctgggccctgcccacctacaacaatcacctctacaagcaaatctccaacagcacatctggaggatcttcaaatgacaacgcctacttcggctacagcaccccctgggggtattttgacttcaaccgcttccactgccacttctcaccacgtgactggcagcgactcatcaacaacaactggggattccggcccaagagactcaacttcaagctcttcaacattcaggtcaaagaggttacggacaacaatggagtcaagaccatcgccaataaccttaccagcacggtccaggtctttacggactcggagtaccagttgccgtacgtcctcggctctgcgcaccagggctgcctccctccgttcccggcggacgtgttcatgattccccagtacggctacctaacactcaacaacggtagtcaggccgtgggacgctcctccttctactgcctggaatatttcccttctcagatgctgagaacgggcaacaactttaccttcagctacacctttgaggacgttcctttccacagcagctacgctcacagccagagtctggaccgtctcatgaatcctctgattgaccagtacctgtactacttgtctcggactcaaacaacaggaggcacggcaaatacgcagactctgggcttcagccaaggtgggcctaatacaatggccaatcaggcaaagaactggctgccaggaccctgttaccgccaacaacgcgtctcaacgacaaccgggcaaaacaacaatagcaactttgcctggactgctgggaccaaataccatctgaatggaagaaattcattggctaatcctggcatcgctatggcaacacacaaagacgacaaggagcgtttttttcccagtaacgggatcctgatttttggcaaacaaaatgctgccagagacaatgcggattacagcgatgtcatgctcaccagcgaggaagaaatcaaaaccactaaccctgtggctacagaggaatacggtatcgtggcagataacttgcagcagcaaaacacggctcctcaaattggaactgtcaacagccagggggccttacccggtatggtctggcagaaccgggacgtgtacctgcagggtcccatctgggcaaagattccacacacggacggacattttcacccctctcccctcatgggtggattcggacttaaacaccctcctccacagattctcatcaagaacaccccggtacctgcgaatcctccgaccaccttcaaccagtcaaagctgaactctttcatcacgcaatacagcacaggacaagtgagtgtggaaattgaatgggagctgcagaaagaaaacagcaagcgctggaatcccgaagtgcagtacacatccaattatgcaaaatctgccaacgttgattttactgtggacaacaatggactttatactgagcctcgccccattggcacccgttaccttacccgtcccctgtaa

SEQ ID NO: 1572 - DNA, 2211 bp, Artificial Sequence
  Description of Artificial Sequence: Synthetic polynucleotide
atggctgccgatggttatcttccagattggctcgaggacaacctctctgagggcattcgcgagtggtgggcgctgaaacctggagccccgaaacccaaagccaaccagcaaaagcaggacgacggccggggtctggtgcttcctggctacaagtacctcggacccttcaacggactcgacaagggggagcccgtcaacgcggcggacgcagcggccctcgagcacgacaaggcctacgaccagcagctcaaggcgggtgacaatccgtacctgcggtataaccacgccgacgccgagtttcaggagcgtctgcaagaagatacgtcttttgggggcaacctcgggcgagcagtcttccaggccaaaaagaggcttcttgaacctcttggtctggttgaggaaggggctaagacggctcctggaaagaaacgtccggtagagcagtcgccacaagagccagactcctcctcgggcattggcaagacaggccagcagcccgctaaaaagagactcaactttgggcagactggcgactcagagtcagtgcccgatcctcaacctctcggagaacctccagcaacccccgctgctgtgggacctactacaatggcttcaggcggtggcgcaccaatggcggacaataacgaaggcgccgatggagtgggtaattcctcgggaaattggcattgcgattccacatggatgggcgacagagtcatcaccaccagcacccgaacctgggccctgcccacctacaacaatcacctctacaagcaaatctccagtgcttcaacgggggccagcaacgacaaccactacttcggctacagcaccccctgggggtattttgatttcaacagattccactgccatttttcaccacgtgactggcagcgactcatcaacaacaactggggattccggcccaagagactcaacttcaagctcttcaacatccaggtcaaggaggtcacgcagaatgaaggcaccaagaccatcgccaataaccttaccagcacgattcaggtctttacggattcggaataccagctcccgtacgtcctcggctctgcgcaccagggctgcctccctccgttcccggcggacgtgttcattattccgcagtacggctacctaacgctcaacaatggtagccaggcagtgggacggtcatccttttactgcctggaatatttcccatcgcagatgctgagaacgggcaacaactttaccttcagctacacctttgaggacgttcctttccacagcagctacgctcacagccagagtctggaccgtctcatgaatcctctgattgaccagtacctgtactacttgtctcggactcaaacaacaggaggcacggcaaatacgcagactctgggcttcagccaaggtgggcctaatacaatggccaatcaggcaaagaactggctgccaggaccctgttaccgccaacaacgcgtctcaacgacaaccgggcaaaacaacaatagcaactttgcctggactgctgggaccaaataccatctgaatggaagaaattcattggctaatcctggcatcgctatggcaacacacaaagacgacaaggagcgtttttttcccagtaacgggatcctgatttttggcaaacaaaatgctgccagagacaatgcggattacagcgatgtcatgctcaccagcgaggaagaaatcaaaaccactaaccctgtggctacagaggaatacggtatcgtggcagataacttgcagcagcaaaacacggctcctcaaattggaactgtcaacagccagggggccttacccggtatggtctggcagaaccgggacgtgtacctgcagggtcccatctgggccaagattcctcacacggacggcaacttccacccgtctccgctgatgggcggctttggcctgaaacatcctccgcctcagatcctgatcaagaacacgccagtacctgcggatcctccgaccaccttcaaccagtcaaagctgaactctttcatcacgcaatacagcaccggacaggtcagcgtggaaattgaatgggagctgcagaaggaaaacagcaagcgctggaaccccgagatccagtacacctccaactactacaaatctacaagtgtggactttgctgttaatacagaaggcgtgtactctgaaccccaccccattggcacccgttacctcacccgtcccctgtaa

SEQ ID NO: 1573 - DNA, 2211 bp, Artificial Sequence
  Description of Artificial Sequence: Synthetic polynucleotide
atggctgccgatggttatcttccagattggctcgaggacaacctctctgagggcattcgcgagtggtgggcgctgaaacctggagccccgaaacccaaagccaaccagcaaaagcaggacgacggccggggtctggtgcttcctggctacaagtacctcggacccttcaacggactcgacaagggggagcccgtcaacgcggcggatgcagcggccctcgagcacgacaaggcctacgaccagcagctcaaggcgggtgacaatccgtacctgcggtataaccacgccgacgccgagtttcaggagcgtctgcaagaagatacgtcttttgggggcaacctcgggcgagcagtcttccaggccaaaaagagggttcttgaaccttttggtctggttgaggaagctgctaagacggctcctggaaagaaacgtccggtagagcagtcgccacaagagccagactcctcctcgggcattggcaagacaggccagcagcccgctaaaaagagactcaattttggtcagactggcgactcagagtcagtgcccgaccctcaacctctcggagaacctccagcaacccccgctgctgtgggacctactacaatggcttcaggcggtggcgcaccaatggcagacaataacgaaggcgccgatggagtgggtaatgcctcaggaaattggcattgcgattccacatggctgggcgacagagtcatcaccaccagcacccgaacctgggccctgcccacctacaacaatcacctctacaagcaaatctccagtgcttcaacgggggccagcaacgacaaccactacttcggctacagcaccccctgggggtattttgactttaacagattccactgccacttttcaccacgtgactggcagcgactcatcaacaacaactggggattccggcccaagagactcaacttcaagctcttcaacatccaggtcaaggaggtcacgcagaatgaaggcaccaagaccatcgccaataacctcaccagcaccattcaggtctttacggattcggaataccagctcccgtacgtcctcggctctgcccaccagggctgcctccctccgttcccggcggacgtgttcatgattccgcagtacggctacctaacgctcaacaatggtagccaggcagtgggacggtcatccttttactgcctggaatatttcccatcgcagatgctgagaacgggcaacaactttaccttcagctacacctttgaggacgttcctttccacagcagctacgctcacagccagagtctggaccgtctcatgaatcctctgattgaccagtacctgtactacttgtctcggactcaaacaacaggaggcacggcaaatacgcagactctgggcttcagccaaggtgggcctaatacaatggccaatcacgcaaagaactggctgccaggaccctgttaccgccaacaacgcgtctcaacgacaaccgggcaaaacaacaatagcaactttgcctggactgctgggaccaaataccatctgaatggaagaaattcattggctaatcctggcatcgctatggcaacacacaaagacgacaaggagcgtttttttcccagtaacgggatcctgatttttggcaaacaaaatgctgccagagacaatgcggattacagcgatgtcatgctcaccagcgaggaagaaatcaaaaccactaaccctgtggctacagaggaatacggtatcgtggcagataacttgcagcagcaaaacacggctcctcaaattggaactgtcaacagccagggggccttacccggtatggtctggcagaaccgggacgtgtacctgcagggtcccatctgggccaagattcctcacacggacggcaacttccacccgtctccgctgatgggcggctttggcctgaaacatcctccgcctcagatcctgatcaagaacacgcctgtacctgcggatcctccgaccaccttcaaccagtcaaagctgaactctttcatcacgcaatacagcaccggacaggtcagcgtggaaattgaatgggagctgcagaaggaaaacagcaagcgctggaaccccgagatccagtacacctccaactactacaaatctacaagtgtggactttgctgttaatacagaaggcgtgtactctgaaccccaccccattggcacccgttacctcacccgtcccctgtaa

SEQ ID NO: 1574 - DNA, 2211 bp, Artificial Sequence
  Description of Artificial Sequence: Synthetic polynucleotide
atggctgccgatggttatcttccagattggctcgaggacaacctctctgagggcattcgcgagtggtgggcgctgaaacctggagccccgaagcccaaagccaaccagcaaaagcaggacgacggccggggtctggtgcttcctggctacaagtacctcggacccttcaacggactcgacaaaggagagcccgtcaacgaggcggacgcggcggccctcgaacacgacaaggcttacgaccagcagctcaaggccggtgacaacccctacctgcggtacaaccacgccgacgccgagttccaggagcggctgcaagaagatacgtcttttgggggcaacctcgggcgagcagtcttccaggccaagaagaggcttcttgaacctcttggtctggttgaggaagcggctaagacggctcctggaaagaagaggcctgtagagcagtctcctcaggaaccggactcctccgcgggtattggcaaatcaggtgcacagcccgctaaaaagagactcaattttggtcagactggcgactcagagtcagtccccgacccacaacctctcggagaacctccagcaacccccgctgctgtgggacctactacaatggcttcaggcggtggcgcaccaatggcagacaataacgaaggcgccgatggagtgggtaatgcctcaggaaattggcattgcgattccacatggctgggcgacagagtcatcaccaccagcacccgaacctgggccctgcccacctataacaaccatctctacaagcaaatctccagtgcttcaacgggggccagtaacgacaaccactacttcggctacagcaccccctgggggtattttgactttaacagattccactgccacttctcaccacgtgactggcagcgactcatcaacaacaactggggattccggcccaagcgactcaacttcaagctcttcaacattcaggtcaaagaggttacggacaacgatggagtcaagaccatcgccaataaccttaccagcaccattcaggtgtttacggactcggaataccagctgccgtacgttctcggctccgcccaccagggctgcctgcctccgttcccggcggacgtgttcatgattccccagtacggctacctaacactcaacaacggtagtcaggccgtgggacgctcctccttctactgcctggaatactttccttcgcagatgctgagaactggcaacaacttccagtttacttacaccttcgaggacgtgcctttccacagcagctacgcccacagccagagcttggaccggctgatgaatcctctgattgaccagtacctgtactacttgtctcggactcaaacaacaggaggcacggcaaatacgcagactctgggcttcagccaaggtgggcctaatacaatggccaatcaggcaaagaactggctgccaggaccctgttaccgccaacaacgcgtctcaacgacaaccgggcaaaacaacaatagcaactttgcctggactgctgggaccaaataccatctgaatggaagaaattcattggctaatcctggcatcgctatggcaacacacaaagacgacaaggagcgtttttttcccagtaacgggatcctgatttttggcaaacaaaatgctgccagagacaatgcggattacagcgatgtcatgctcaccagcgaggaagaaatcaaaaccactaaccctgtggctacagaggaatacggtatcgtggcagataacttgcagcagcaaaacacggctcctcaaattggaactgtcaacagccagggggccttacccggtatggtctggcagaaccgggacgtgtacctgcagggtcccatctgggccaagattcctcacacggacggcaacttccacccgtctccgctgatgggcggctttggcctgaaacatcctccgcctcagatcctgatcaagaacacgcctgtacctgcggatcctccgaccaccttcaaccagtcaaagctgaactctttcatcacgcaatacagcaccggacaggtcagcgtggaaattgaatgggagctgcagaaggaaaacagcaagcgctggaaccccgagatccagtacacctccaactactacaaatctacaagtgtggactttgctgttaatacagaaggcgtgtactctgaaccccaccccattggcacccgttacctcacccgtcccctgtaa

SEQ ID NO: 1575 - DNA, 2211 bp, Artificial Sequence
  Description of Artificial Sequence: Synthetic polynucleotide
atggctgccgatggttatcttccagattggctcgaggacaacctctctgagggcattcgcgagtggtgggcgctgaaacctggagccccgaagcccaaagccaaccagcaaaagcaggacgacggccggggtctggtgcttcctggctacaagtacctcggacccttcaacggactcgacaagggggagcccgtcaacgcggcggatgcagcggccctcgagcacgacaaagcctacgaccagcagctcaaagcgggtgacaatccgtacctgcggtataaccacgccgacgccgagtttcaggagcgtctgcaagaagatacgtcttttgggggcaacctcgggcgagcagtcttccaggccaagaagagggttctcgaacctttgggtctggttgaggaaggggctaagacggctcctggaaagaaaaggccggtagagcagtctcctcaggaaccggactcctccgcgggtattggcaagacaggtgcacagcccgctaaaaagagactcaattttggtcagactggcgactcagagtcagtccccgacccacaacctctcggagaacctccagcaacccccgctgctgtgggacctactacaatggcttcaggcggtggcgcaccaatggcagacaataacgaaggcgccgacggagtgggtagtgcctcgggaaattggcattgcgattccacatggctgggcgacagagtcatcaccaccagcacccgaacctgggccctgcccacctataacaaccatctctacaagcaaatctccagtgcttcaacgggggccagtaacgacaaccactacttcggctacagcaccccctgggggtattttgacttcaacagattccactgccacttctcaccacgtgactggcagcgactcatcaacaacaactggggattccggcccaagcgactcaacttcaagctcttcaacattcaggtcaaagaggttacggacaacaatggagtcaagaccatcgccaataaccttaccagcacgatccaggtctttacggactcggagtaccagctgccgtacgtcctcggctctgcgcaccagggctgcctgcctccgttcccggcggacgtgttcatgattccgcagtacggctacctaacgctcaacaatggtagccaggcagtgggacggtcatccttttactgcctggaatatttcccatcgcagatgctgagaacgggcaacaactttaccttcagctacacctttgaggacgttcctttccacagcagctacgctcacagccagagtctggaccgtctcatgaatcctctgattgaccagtacctgtactacttgtctcggactcaaacaacaggaggcacggcaaatacgcagactctgggcttcagccaaggtgggcctaatacaatggccaatcaggcaaagaactggctgccaggaccctgttaccgccaacaacgcgtctcaacgacaaccgggcaaaacaacaatagcaactttgcctggactgctgggaccaaataccatctgaatggaagaaattcattggctaatcctggcatcgctatggcaacacacaaagacgacaaggagcgtttttttcccagtaacgggatcctgatttttggcaaacaaaatgctgccagagacaatgcggattacagcgatgtcatgctcaccagcgaggaagaaatcaaaaccactaaccctgtggctacagaggaatacggtatcgtggcagataacttgcagcagcaaaacacggctcctcaaattggaactgtcaacagccagggggccttacccggtatggtctggcagaaccgggacgtgtacctgcagggtcccatctgggccaagattcctcacacggacggcaacttccacccgtctccgctgatgggcggctttggcctgaaacatcctccgcctcagatcctgatcaagaacacgcctgtacctgcggatcctccgaccaccttcaaccagtcaaagctgaactctttcatcacgcaatacagcaccggacaggtcagcgtggaaattgaatgggagctgcagaaggaaaacagcaagcgctggaaccccgagatccagtacacctccaactactacaaatctacaagtgtggactttgctgttaatacagaaggcgtgtactctgaaccccaccccattggcacccgttacctcacccgtcccctgtaa

SEQ ID NO: 1576 - DNA, 2211 bp, Artificial Sequence
  Description of Artificial Sequence: Synthetic polynucleotide
atggctgccgatggttatcttccagattggctcgaggacaacctctctgagggcattcgcgagtggtgggacttgaaacctggagccccgaagcccaaagccaaccagcaaaagcaggacgacggccggggtctggtgcttcctggctacaagtacctcggacccttcaacggactcgacaagggggagcccgtcaacgcggcggacgcagcggccctcgagcacgacaaggcctacgaccagcagctcaaagcgggtgacaatccgtacctgcggtataaccacgccgacgccgagtttcaggagcgtctgcaagaagatacgtcttttgggggcaacctcggacgagcagtcttccaggccaaaaagaggcttcttgaacctcttggtctggttgaggaagcggctaagacggctcctggaaagaagaggcctgtagagcagtctcctcaggaaccggactcctccgcgggtattggcaaatcgggtgcacagcccgctaaaaagagactcaatttcggtcagactggcgacacagagtcagtcccagaccctcaaccaatcggagaacctccagcagcgccctctggtgtgggacctaatacaatggctgcaggcggtggcgcaccaatggcagacaataacgaaggtgccgatggagtgggtagttcctcgggaaattggcattgcgattcccaatggctgggggacagagtcatcaccaccagcacccgaacctgggccctgcccacctataacaaccacctctacaagcaaatctccagtgcttcaacgggggccagcaacgacaaccactactttggctacagcaccccttgggggtattttgacttcaacagattccactgccacttttcaccacgtgactggcaaagactcatcaacaacaactggggattccgacccaagagactcaacttcaagctcttcaacatccaggtcaaggaggtcacgcagaatgaaggcaccaagaccatcgccaataacctcaccagcaccatccaggtgtttacggactcggagtaccagctgccgtacgttctcggctctgcccaccagggctgcctgcctccgttcccggcggacgtgttcatgattccccagtacggctacctaacactcaacaacggtagtcaggccgtgggacgctcctccttctactgcctggaatactttccttcgcagatgctgagaaccggcaacaacttccagtttacttacaccttcgaggacgtgcctttccacagcagctacgcgcacagccagagcttggaccggctgatgaatcctctgattgaccagtacctgtactacttgtctcggactcaaacaacaggaggcacggcaaatacgcagactctgggcttcagccaaggtgggcctaatacaatggccaatcacgcaaagaactggctgccaggaccctgttaccgccaacaacgcgtctcaacgacaaccgggcaaaacaacaatagcaactttgcctggactgctgggaccaaataccatctgaatggaagaaattcattggctaatcctggcatcgctatggcaacacacaaagacgacaaggagcgtttttttcccagtaacgggatcctgatttttggcaaacaaaatgctgccagagacaatgcggattacagcgatgtcatgctcaccagcgaggaagaaatcaaaaccactaaccctgtggctacagaggaatacggtatcgtggcagataacttgcagcagcaaaacacggctcctcaaattggaactgtcaacagccagggggccttacccggtatggtctggcagaaccgggacgtgtacctgcagggtcccatctgggccaagattcctcacacggacggcaacttccacccgtctccgctgatgggcggctttggcctgaaacatcctccgcctcagatcctgatcaagaacacgcctgtacctgcggatcctccgaccaccttcaaccagtcaaagctgaactctttcatcacgcaatacagcaccggacaggtcagcgtggaaattgaatgggagctgcagaaggaaaacagcaagcgctggaaccccgagatccagtacacctccaactactacaaatctacaagtgtggactttgctgttaatacagaaggcgtgtactctgaaccccaccccattggcacccgttacctcacccgtcccctgtaa

SEQ ID NO: 1577 - DNA, 2214 bp, Artificial Sequence
  Description of Artificial Sequence: Synthetic polynucleotide
atggctgccgatggttatcttccagattggctcgaggacaaccttagtgaaggaattcgcgagtggtgggcgctgaaacctggagccccgaagcccaaagccaaccagcaaaagcaggacgacggccggggtctggtgcttcctggctacaagtacctcggacccttcaacggactcgacaagggggagcccgtcaacgcggcggacgcagcggccctcgagcacgacaaggcctacgaccagcagctcaaagcgggtgacaatccgtacctgcggtataaccacgccgacgccgagtttcaggagcgtctgcaagaagatacgtcttttgggggcaacctcgggcgagcagtcttccaggccaagaagcgggttctcgaacctctcggtctggttgaggaaggcgctaagacggctcctggaaagaaacgtccggtagagcagtcgccacaagagccagactcctcctcgggcatcggcaagacaggccagcagcccgctaaaaagagactcaatttcggtcagactggcgacacagagtcagtcccagaccctcaaccaatcggagaacctcccgcagccccctcaggtgtgggatctcttacaatggcttcaggtggtggcgcaccagtggcagacaataacgaaggtgccgatggagtgggtagttcctcgggaaattggcattgcgattcccaatggctgggggacagagtcatcaccaccagcaccagaacctgggccttgcccacctacaataaccacctctacaagcaaatctccaacagcacatctggaggatcttcaaatgacaacgcctacttcggctacagcaccccctgggggtattttgactttaacagattccactgccacttttcaccacgtgactggcagcgactcatcaacaacaactggggattccgacccaagagactcaacttcaagctcttcaacatccaggtcaaggaggtcacgcagaacgaaggcaccaagaccatcgccaataacctcaccagcaccatccaggtgtttacggactcggagtaccagctgccgtacgttctcggctccgcccaccagggctgcctgcctccgttcccggcggacgtgttcatgattccccagtacggctacctaacgctcaacaacggtagtcaggccgtgggacgctcctccttctactgcctggaatactttccttcgcagatgctgagaaccggcaacaacttccagtttacttacaccttcgaggacgtgcctttccacagcagctacgcgcacagccagagcttggaccggctgatgaatcctctgattgaccagtacctgtactacttgtctcggactcaaacaacaggaggcacggcaaatacgcagactctgggcttcagccaaggtgggcctaatacaatggccaatcaggcaaagaactggctgccaggaccctgttaccgccaacaacgcgtctcaacgacaaccgggcaaaacaacaatagcaactttgcctggactgctgggaccaaataccatctgaatggaagaaattcattggctaatcctggcatcgctatggcaacacacaaagacgacaaggagcgtttttttcccagtaacgggatcctgatttttggcaaacaaaatgctgccagagacaatgcggattacagcgatgtcatgctcaccagcgaggaagaaatcaaaaccactaaccctgtggctacagaggaatacggtatcgtggcagataacttgcagcagcaaaacacggctcctcaaattggaactgtcaacagccagggggccttacccggtatggtctggcagaaccgggacgtgtacctgcagggtcccatctgggccaagattcctcacacggacggcaacttccacccgtctccgctgatgggcggctttggcctgaaacatcctccgcctcagatcctgatcaagaacacgcctgtacctgcggatcctccgaccaccttcaaccagtcaaagctgaactctttcatcacgcaatacagcaccggacaggtcagcgtggaaattgaatgggagctgcagaaggaaaacagcaagcgctggaaccccgagatccagtacacctccaactactacaaatctacaagtgtggactttgctgttaatacagaaggcgtgtactctgaaccccaccccattggcacccgttacctcacccgtcccctgtaa

SEQ ID NO: 1578 - DNA, 2214 bp, Artificial Sequence
  Description of Artificial Sequence: Synthetic polynucleotide
atggctgccgatggttatcttccagattggctcgaggacaaccttagtgaaggaattcgcgagtggtgggcgctgaaacctggagccccgaagcccaaagccaaccagcaaaagcaggacgacggccggggtctggtgcttcctggctacaagtacctcggacccttcaacggactcgacaagggggagcccgtcaacgcggcggacgcagcggccctcgagcacgacaaggcctacgaccagcagctcaaagcgggtgacaatccgtacctgcggtataaccacgccgacgcggagtttcaggagcgccttaaagaagatacgtcttttgggggcaacctcgggcgagcagtcttccaggccaagaagagggttctcgaaccttttggtctggttgaggaaggtgctaagacggctcctggaaagaaacgtccggtagagcagtcgccacaagagccagactcctcctcgggcatcggcaagacaggccagcagcccgctaaaaagagactcaattttggtcagactggcgactcagagtcagttccagaccctcaacctctcggagaacctccagcagcgccctctggtgtgggacctaatacaatggctgcaggcggtggcgcaccaatggcagacaataacgaaggtgccgatggagtgggtagttcctcgggaaattggcattgcgattcccaatggctggggaacagagtcatcaccaccagcacccgaacctgggccctgcccacctacaacaatcacctctacaagcaaatctccaacagcacatctggaggatcttcaaatgacaacgcctacttcggctacagcaccccctgggggtattttgacttcaacagattccactgccacttctcaccacgtgactggcagcgactcatcaacaacaactggggattccggcccaagagactcaacttcaagctcttcaacattcaggtcaaagaggttacggacaacaatggagtcaagaccatcgccaataaccttaccagcacggtccaggtcttcacggactcggagtaccagttgccgtacgtcctcggctctgcgcaccagggctgcctccctccgttcccggcggacgtgttcatgattccgcaatacggctacctgacgctcaacaacggtagccaagccgtgggacgttcatccttttactgcctggaatatttcccttctcagatgctgagaaccggcaacaacttccagtttacttacaccttcgaggacgtgcctttccacagcagctacgcgcacagccagagcttggaccggctgatgaatcctctgattgaccagtacctgtactacttgtctcggactcaaacaacaggaggcacggcaaatacgcagactctgggcttcagccaaggtgggcctaatacaatggccaatcaggcaaagaactggctgccaggaccctgttaccgccaacaacgcgtctcaacgacaaccgggcaaaacaacaatagcaactttgcctggactgctgggaccaaataccatctgaatggaagaaattcattggctaatcctggcatcgctatggcaacacacaaagacgacaaggagcgtttttttcccagtaacgggatcctgatttttggcaaacaaaatgctgccagagacaatgcggattacagcgatgtcatgctcaccagcgaggaagaaatcaaaaccactaaccctgtggctacagaggaatacggtatcgtggcagataacttgcagcagcaaaacacggctcctcaaattggaactgtcaacagccagggggccttacccggtatggtctggcagaaccgggacgtgtacctgcagggtcccatctgggccaagattcctcacacggacggcaacttccacccgtctccgctgatgggcggctttggcctgaaacatcctccgcctcagatcctgatcaagaacacgcctgtacctgcggatcctccgaccaccttcaaccagtcaaagctgaactctttcatcacgcaatacagcaccggacaggtcagcgtggaaattgaatgggagctgcagaaggaaaacagcaagcgctggaaccccgagatccagtacacctccaactactacaaatctacaagtgtggactttgctgttaatacagaaggcgtgtactctgaaccccaccccattggcacccgttacctcacccgtcccctgtaa

SEQ ID NO: 1579 - DNA, 2211 bp, Artificial Sequence
  Description of Artificial Sequence: Synthetic polynucleotide
atggctgccgatggttatcttccagattggctcgaggacaacctctctgagggcattcgcgagtggtgggacttgaaacctggagccccgaagcccaaagccaaccagcaaaagcaggacgacggccggggtctggtgcttcctggctacaagtacctcggacccttcaacggactcgacaggggggagcccgtcaacgcggcggacgcagcggccctcgagcacgacaaggcctacgaccagcagctcaaagcgggtgacaatccgtacctgcggtataaccacgccgacgccgagtttcaggagcgtctgcaagaagatacgtcttttgggggcaacctcgggcgagcagtcttccaggccaagaagcgggttctcgaacctctcggtctggttgaggaaggcgctaagacggctcctggaaagaaacgtccggtagagcagtcgccacaagagccagactcctcctcgggcatcggcaagacaggccagcagcccgctaaaaagagactcaattttggtcagactggcgactcagagtcagtccccgacccacaacctctcggagaacctccagcaacccccgctgctgtgggacctactacaatggcttcaggcggtggcgcaccaatggcagacaataacgaaggcgccgacggagtgggtaatgcctcaggaaattggcattgcgattccacatggctgggcgacagagtcatcaccaccagcacccgaacctgggccttgcccacctataacaaccacctctacaagcaaatctccagtgcttcaacgggggccagcaacgacaaccactacttcggctacagcaccccctgggggtattttgacttcaacagattccactgccacttctcaccacgtgactggcagcgactcatcaacaacaactggggattccggcctaagcgactcaacttcaagctcttcaacattcaggtcaaagaggttacggacaacaatggagtcaagaccatcgccaataacctcaccagcaccatccaggtgtttacggactcggagtaccagctgccgtacgttctcggctctgcccaccagggctgcctgcctccgttcccggcggacgtgttcatgattccccagtacggctacctaacactcaacaacggtagtcaggccgtgggacgctcctccttctactgcctggaatactttccttcgcagatgctgagaaccggcaacaacttccagtttacttacaccttcgaggacgtgcctttccacagcagctacgcccacagccagagcttggaccggctgatgaatcctctgattgaccagtacctgtactacttgtctcggactcaaacaacaggaggcacggcaaatacgcagactctgggcttcagccaaggtgggcctaatacaatggccaatcaggcaaagaactggctgccaggaccctgttaccgccaacaacgcgtctcaacgacaaccgggcaaaacaacaatagcaactttgcctggactgctgggaccaaataccatctgaatggaagaaattcattggctaatcctggcatcgctatggcaacacacaaagacgacaaggagcgtttttttcccagtaacgggatcctgatttttggcaaacaaaatgctgccagagacaatgcggattacagcgatgtcatgctcaccagcgaggaagaaatcaaaaccactaaccctgtggctacagaggaatacggtatcgtggcagataacttgcagcagcaaaacacggctcctcaaattggaactgtcaacagccagggggccttacccggtatggtctggcagaaccgggacgtgtacctgcagggtcccatctgggccaagattcctcacacggacggcaacttccacccgtctccgctgatgggcggctttggcctgaaacatcctccgcctcagatcctgatcaagaacacgcctgtacctgcggatcctccgaccaccttcaaccagtcaaagctgaactctttcatcacgcaatacagcaccggacaggtcagcgtggaaattgaatgggagctgcagaaggaaaacagcaagcgctggaaccccgagatccagtacacctccaactactacaaatctacaagtgtggactttgctgttaatacagaaggcgtgtactctgaaccccaccccattggcacccgttacctcacccgtcccctgtaa

SEQ ID NO: 1580 - DNA, 2211 bp, Artificial Sequence
  Description of Artificial Sequence: Synthetic polynucleotide
atggctgccgatggttatcttccagattggctcgaggacaacctctctgagggcattcgcgagtggtgggacttgaaacctggagccccgaagcccaaagccaaccagcaaaagcaggacgacggccggggtctggtgcttcctggctacaagtacctcggacccttcaacggactcgacaagggggagcccgtcaacgcggcggacgcagcggccctcgagcacgacaaggcctacgaccagcagctcaaagcgggtgacaatccgtacctgcggtataaccacgccgacgccgagtttcaggagcgtctgcaagaagatacgtcttttgggggcaacctcgggcgagcagtcttccaggccaagaagcgggttctcgaacctctcggtctggttgaggaaggcgctaagacggctcctggaaagaaacgtccggtagagcagtcgccacaagagccagactcctcctcgggcatcggcaagaaaggccaacagcccgccagaaaaagactcaattttggtcagactggcgactcagagtcagttccagaccctcaacctctcggagaacctcccgcagccccctcaggtgtgggatctcttacaatggcttcaggcggtggcgcaccaatggcagacaataacgaaggcgccgacggagtgggtaatgcctcaggaaattggcattgcgattccacatggctgggcgacagagtcatcaccaccagcacccgaacatgggccttgcccacttacaacaaccatctctacaagcaaatctccagtgcttcaacgggggccagcaacgacaaccactacttcggctacagcaccccctgggggtattttgatttcaacagattccactgccacttttcaccacgtgactggcaaagactcatcaacaacaactggggattccgacccaagagactcaacttcaagctctttaacattcaagtcaaagaggtcacgcagaatgaaggcaccaagaccatcgccaataaccttaccagcacggtccaggtcttcacggactcagactatcagctcccgtacgttctcggctccgcccaccagggctgcctgcctccgttcccggcggacgtgttcatgattccccagtacggctacctaacactcaacaacggtagtcaggccgtgggacgctcctccttctactgcctggaatactttccttcgcagatgctgagaaccggcaacaacttccagtttacttacacctttgaggacgttcctttccacagcagctacgctcacagccagagtctggaccgtctcatgaatcctctgattgaccagtacctgtactacttgtctcggactcaaacaacaggaggcacggcaaatacgcagactctgggcttcagccaaggtgggcctaatacaatggccaatcaggcaaagaactggctgccaggaccctgttaccgccaacaacgcgtctcaacgacaaccgggcaaaacaacaatagcaactttgcctggactgctggaaccaaataccatctgaatggaagaaattcattgtctaatcctggcatcgctatggcgacacacaaagacgacaaggagcgtttttttcccagtaacgggatcctgatttttggcaaacaaaatgctgccagagacaatgcggattacagcgatgtcatgctcaccagcgaggaagaaatcaaaaccactaaccctgtggctacagaggaatacggtatcgtggcagataacttgcagcagcaaaacacggctcctcaaattggaactgtcaacagccagggggccttacccggtatggtctggcagaaccgggacatgtacctgcagggtcccatctgggccaagattcctcacacggacggcaacttccacccgtctccgctgatgggcggctttggcctgaaacatcctccgcctcagatcctgatcaagaacacgcctgtacctgcggatcctccgaccaccttcaaccagtcaaagctgaactctttcatcacgcaatacagcaccggacaggtcagcgtggaaattgaatgggagctgcagaaggaaaacagcaagcgctggaaccccgagatccagtacacctccaactactacaaatctacaagtgtggactttgctgttaatacagaaggcgtgtactctgaaccccaccccattggcacccgttacctcacccgtcccctgtaa

SEQ ID NO: 1581 - DNA, 2211 bp, Artificial Sequence
  Description of Artificial Sequence: Synthetic polynucleotide
atggctgccgatggttatcttccagattggctcgaggacaacctctctgagggcattcgcgagtggtgggcgctgaaacctggagccccgaagcccaaagccaaccagcaaaagcaggacgacggccggggtctggtgcttcctggctacaagtacctcggacccttcaacggactcgacaagggggagcccgtcaacgcggcggatgcagcggccctcgagcacgacaaggcctacgaccagcagctcaaagcgggtgacaatccgtacctgcggtataaccacgccgacgccgagtttcaggagcgtctgcaggaagatacgtcttttgggggcaacctcgggcgagcagtcttccaggccaagaagagggttctcgaaccttttggtctggttgaggaaggcgctaagacggctcctggaaagaaacgtccggtagagcagtcgccacaagagccagactcctcctcgggcatcggcaagacaggccagcagcccgctaaaaagagactcaattttggtcagactggcggctcagagtcagtccccgacccacaacctctcggagaacctccagcaacccccgctgctgtgggacctactacaatggctgcaggcggtggcgcaccaatggcagacaataacgaaggcgccgacggagtgggtagttcctcgggaaattggcattgcgattccacatggctgggcgacagagtcatcaccaccagcaccagaacctgggccttgcccacctataacaaccacctctacaagcaaatctccagtgcttcaacgggggccagcaacgacaaccactacttcggctacagcaccccctgggggtattttgatttcaacagattccactgccatttctcaccacgtgactggcagcgactcatcaacaacaactggggattccggcccaagagactcaacttcaaactcttcaacattcaggtcaaagaggttacggacaacaatggagtcaagaccatcgccaataaccttaccagcacggtccaggtgtttacggactcggagtaccagctgccgtacgttctcggctctgcccaccagggctgcctccctccgttcccggcggacgtgttcatgattccgcagtacggctacctaacgctcaacaatggcagccaggcagtgggacggtcatccttttactgcctggaatatttcccttctcagatgctgagaacgggcaacaactttaccttcagctacacctttgaggaagtgcctttccacagcagctacgcgcacagccagagcctggaccggctgatgaatcctctgattgaccagtacctgtactacttgtctcggactcaaacaacaggaggcacggcaaatacgcagactctgggcttcagccaaggtgggcctaatacaatggccaatcaggcaaagaactggctgccaggaccctgttaccgccaacaacgcgtctcaacgacaaccgggcaaaacaacaatagcaactttgcctggactgctgggaccaaataccatctgaatggaagaaattcattggctaatcctggcatcgctatggcctcacacaaagacgacaaggagcgtttttttcccagtaacgggatcctgatttttggcaaacaaaatgctgccagagacaatgcggattacagcgatgtcatgctcaccagcgaggaagaaatcaaaaccactaaccctgtggctacagaggaatacggtatcgtggcagataacttgcagcagcaaaacacggctcctcaaattggaactgtcaacagccagggggccttacccggtatggtctggcagaaccgggacgtgtacctgcagggtcccatctgggccaagattcctcacacggacggcaacttccacccgtctccgctgatgggcggctttggcctgaaacatcctccgcctcagatcctgatcaagaacacgcctgtacctgcggatcctccgaccaccttcaaccagtcaaagctgaactctttcatcacgcaatacagcaccggacaggtcagcgtggaaattgaatgggagctgcagaaggaaaacagcaagcgctggaaccccgagatccagtacacctccaactactacaaatctacaagtgtggactttgctgttaatacagaaggcgtgtactctgaaccccaccccattggcacccgttacctcacccgtcccctgtaa

SEQ ID NO: 1582 - protein, 736 aa, Artificial Sequence
  Description of Artificial Sequence: Synthetic polypeptide
MAADGYLPDWLEDTLSEGIRQWWKLKPGPPPPKPAERHKDDSRGLVLPGYKYLGPFNGLDKGEPVNEADAAALEHDKAYDQQLKAGDNPYLKYNHADAEFQERLKEDTSFGGNLGRAVFQAKKRVLEPLGLVEEGAKTAPGKKRPVEQSPQEPDSSSGIGKTGQQPAKKRLNFGQTGDSESVPDPQPLGEPPATPAAVGPTTMASGGGAPMADNNEGADGVGSSSGNWHCDSQWLGDRVITTSTRTWALPTYNNHLYKQISSASTGASNDNHYFGYSTPWGYFDFNRFHCHFSPRDWQRLINNNWGFRPKRLNFKLFNIQVKEVTQNEGTKTIANNLTSTIQVFTDSEYQLPYVLGSAHQGCLPPFPADVFMIPQYGYLTLNNGSQAVGRSSFYCLEYFPSQMLRTGNNFQFTYTFEDVPFHSSYAHSQSLDRLMNPLIDQYLYYLSRTQTTGGTANTQTLGFSQGGPNTMANQAKNWLPGPCYRQQRVSTTTGQNNNSNFAWTAGTKYHLNGRNSLANPGIAMATHKDDKERFFPSNGILIFGKQNAARDNADYSDVMLTSEEEIKTTNPVATEEYGIVADNLQQQNTAPQIGTVNSQGALPGMVWQNRDVYLQGPIWAKIPHTDGNFHPSPLMGGFGLKHPPPQILIKNTPVPADPPTTFNQSKLNSFITQYSTGQVSVEIEWELQKENSKRWNPEIQYTSNYYKSTSVDFAVNTEGVYSEPHPIGTRYLTRPL

SEQ ID NO: 1583 - protein, 736 aa, Artificial Sequence
  Description of Artificial Sequence: Synthetic polypeptide
MAADGYLPDWLEDNLSEGIREWWALKPGAPKPKANQQKQDDGRGLVLPGYKYLGPFNGLDKGEPVNAADAAALEHDKAYDQQLKAGDNPYLKYNHADAEFQERLKEDTSFGGNLGRAVFQAKKRLLEPLGLVEEAAKTAPGKKRPVEQSPQEPDSSAGIGKSGAQPAKKRLNFGQTGDSESVPDPQPLGEPPATPAAVGPTTMASGGGAPMADNNEGADGVGNASGNWHCDSTWLGDRVITTSTRTWALPTYNNHLYKQISSASTGASNDNHYFGYSTPWGYFDFNRFHCHFSPRDWQRLINNNWGFRPKRLNFKLFNIQVKEVTQNEGTKTIANNLTSTIQVFTDSEYQLPYVLGSAHQGCLPPFPADVFMIPQYGYLTLNNGSQAVGRSSFYCLEYFPSQMLRTGNNFQFTYTFEDVPFHSSYAHSQSLDRLMNPLIDQYLYYLSRTQTTGGTANTQTLGFSQGGPNTMANQAKNWLPGPCYRQQRVSTTTGQNNNSNFAWTAGTKYHLNGRNSLANPGIAMATHKDDKERFFPSNGILIFGKQNAARDNADYSDVMLTSEEEIKATNPVATEEYGIVADNLQQQNTAPQIGTVNSQGALPGMVWQNRDVYLQGPIWAKIPHTDGNFHPSPLMGGFGLKHPPPQILIKNTPVPADPPTTFNQSKLNSFITQYSTGQVSVEIEWELQKENSKRWNPEIQYTSNYYKSTSVDFAVNTEGVYSEPHPIGTRYLTRPL

SEQ ID NO: 1584 - protein, 737 aa, Artificial Sequence
  Description of Artificial Sequence: Synthetic polypeptide
MAADGYLPDWLEDNLSEGIREWWDLKPGAPKPKANQQKQDDGRGLVLPGYKYLGPFNGLDKGEPVNAADAAALEHDKAYDQQLKAGDNPYLRYNHADAEFQERLQEDTSFGGNLGRAVFQAKKRVLEPLGLVEEGANTAPGKKRPVEQSPQEPDSSAGIGKSGAQPAKKRLNFGQTGDTESVPDPQPIGEPPAAPSGVGSLTMASGGGAPVADNNEGADGVGSSSGNWHCDSQWLGDRVITTSTRTWALPTYNNHLYKQISNSTSGGSSNDNAYFGYSTPWGYFDFNRFHCHFSPRDWQRLINNNWGFRPKRLNFKLFNIQVKEVTDNNGVKTIANNLTSTIQVFTDSEYQLPYVLGSAHQGCLPPFPADVFMIPQYGYLTLNNGSQAVGRSSFYCLEYFPSQMLRTGNNFQFTYTFEDVPFHSSYAHSQSLDRLMNPLIDQYLYYLSRTQTTGGTANTQTLGFSQGGPNTMANQAKNWLPGPCYRQQRVSTTTGQNNNSNFAWTAGTKYHLNGRNSLANPGIAMASHKDDKERFFPSNGILIFGKQNAARDNADYSDVMLTSEEEIKTTNPVATEEYGIVADNLQQQNTAPQIGTVNSQGALPGMVWQNRDVYLQGPIWAKIPHTDGNFHPSPLMGGFGLKHPPPQILIKNTPVPADPPTTFNQSKLNSFITQYSTGQVSVEIEWELQKENSKRWNPEIQYTTNYYKSTSVDFAVNTEGVYSEPHPIGTRYLTRPL

SEQ ID NO: 1585 - protein, 736 aa, Artificial Sequence
  Description of Artificial Sequence: Synthetic polypeptide
MAADGYLPDWLEDNLSEGIREWWALKPGAPKPKANQQKQDDGRGLVLPGYKYLGPFNGLDKGEPVNEADAAALEHDKAYDQQLKAGDNPYLRYNHADAEFQERLQEDTSFGGNLGRAVFQAKKRVLEPLGLVEEGAKTAPGKKRPVEQSPQEPDSSSGIGKTGQQPAKKRLNFGQTGDSESVPDPQPLGEPPATPAAVGPTTMASGGGAPMADNNEGADGVGNASGNWHCDSTWLGDRVITTSTRTWALPTYNNHLYKQISSASTGASNDNHYFGYSTPWGYFDFNRFHCHFSPRDWQRLINNNWGFRPKRLNFKLFNIQVKEVTQNEGTKTIANNLTSTIQVFTDSEYQLPYVLGSAHQGCLPPFPADVFMIPQYGYLTLNNGSQAVGRSSFYCLEYFPSQMLRTGNNFQFTYTFEDVPFHSSYAHSQSLDRLMNPLIDQYLYYLSRTQTTGGTANTQTLGFSQGGPNTMANQAKNWLPGPCYRQQRVSTTTGQNNNSNFAWTAGTKYHLNGRNSLANPGIAMATHKDDKERFFPSNGILIFGKQNAARDNADYSDVMLTSEEEIKTTNPVATEEYGIVADNLQQQNTAPQIGTVNSQGALPGMVWQNRDVYLQGPIWAKIPHTDGNFHPSPLMGGFGLKHPPPQILIKNTPVPADPPTTFNQSKLNSFITQYSTGQVSVEIEWELQKENSKRWNPEIQYTSNYYKSTSVDFAVNTEGVYSEPHPIGTRYLTRPL

SEQ ID NO: 1586 - protein, 736 aa, Artificial Sequence
  Description of Artificial Sequence: Synthetic polypeptide
MAADGYLPDWLEDNLSEGIREWWALKPGAPKPKANQQKQDDGRGLVLPGYKYLGPFNGLDKGEPVNEADAAALEHDKAYDQQLKAGDNPYLRYNHADAEFQERLQEDTSFGGNLGRAVFQAKKRVLEPFGLVEEGAKTAPGKKRPVEQSPQEPDSSSGIGKTGQQPAKKRLNFGQTGDSESVPDPQPLGEPPATPAAVGPTTMASGGGAPMADNNEGADGVGNASGNWHCDSQWLGDRVITTSTRTWALPTYNNHLYKQISSASTGASNDNHYFGYSTPWGYFDFNRFHCHFSPRDWQRLINNNWGFRPKRLNFKLFNIQVKEVTDNNGVKTIANNLTSTVQVFSDSEYQLPYVLGSAHQGCLPPFPADVFMIPQYGYLTLNNGSQAVGRSSFYCLEYFPSQMLRTGNNFQFTYTFEDVPFHSSYAHSQSLDRLMNPLIDQYLYYLSRTQTTGGTANTQTLGFSQGGPNTMANQAKNWLPGPCYRQQRVSTTTGQNNNSNFAWTAGTKYHLNGRNSLANPGIAMATHKDDKERFFPSNGILIFGKQNAARDNADYSDVMLTSEEEIKTTNPVATEEYGIVADNLQQQNTAPQIGTVNSQGALPGMVWQNRDVYLQGPIWAKIPHTDGNFHPSPLMGGFGLKHPPPQILIKNTPVPADPPTTFNQSKLNSFITQYSTGQVSVEIEWELQKENSKRWNPEIQYTSNYYKSTSVDFAVNTEGVYSEPHPIGTRYLTRPL

SEQ ID NO: 1587 - protein, 736 aa, Artificial Sequence
  Description of Artificial Sequence: Synthetic polypeptide
MAADGYLPDWLEDTLSEGIRQWWKLKPGPPPPKPAERHKDDSRGLVLPGYKYLGPFNGLDKGEPVNEADAAALEHDKAYDRQLDSGDNPYLKYNHADAEFQERLKEDTSFGGNLGRAVFQAKKRVLEPFGLVEEGAKTAPGKKRPVEQSPQEPDSSSGIGKTGQQPAKKRLNFGQTGDSESVPDPQPLGEPPATPAAVGPTTMASGGGAPMADNNEGADGVGNASGNWHCDSTWLGDRVITTSTRTWALPTYNNHLYKQISSASTGASNDNHYFGYSTPWGYFDFNRFHCHFSPRDWQRLINNNWGFRPKRLNFKLFNIQVKEVTDNNGVKTIANNLTSTVQVFTDSDYQLPYVLGSAHEGCLPPFPADVFMIPQYGYLTLNNGSQAVGRSSFYCLEYFPSQMLRTGNNFQFTYTFEDVPFHSSYAHSQSLDRLMNPLIDQYLYYLSRTQTTGGTANTQTLGFSQGGPNTMANQAKNWLPGPCYRQQRVSTTTGQNNNSNFAWTAGTKYHLNGRNSLANPGIAMATHKDDKERFFPSNGILIFGKQNAARDNADYSDVMLTSEEEIKTTNPVATEEYGIVADNLQQQNTAPQIGTVNSQGALPGMVWQNRDVYLQGPIWAKIPHTDGNFHPSPLMGGFGLKHPPPQILIKNTPVPADPPTTFNQSKLNSFITQYSTGQVSVEIEWELQKENSKRWNPEIQYTSNYYKSTSVDFAVNTEGVYSEPHPIGTRYLTRNL

SEQ ID NO: 1588 - protein, 738 aa, Artificial Sequence
  Description of Artificial Sequence: Synthetic polypeptide
MAADGYLPDWLEDNLSEGIREWWDLKPGAPKPKANQQKQDDGRGLVLPGYKYLGPFNGLDKGEPVNAADAAALEHDKAYDQQLQAGDNPYLRYNHADAEFQERLQEDTSFGGNLGRAVFQAKKRVLEPLGLVEEGAKTAPGKKRPVEPSPQRSPDSSTGIGKKGQQPARKRLNFGQTGDSESVPDPQPLGEPPAAPSGVGPNTMAAGGGAPMADNNEGADGVGSSSGNWHCDSQWLGDRVITTSTRTWALPTYNNHLYKQISNSTSGGSSNDNAYFGYSTPWGYFDFNRFHCHFSPRDWQRLINNNWGFRPKRLSFKLFNIQVKEVTQNEGTKTIANNLTSTIQVFTDSEYQLPYVLGSAHQGCLPPFPADVFMIPQYGYLTLNNGSQAVGRSSFYCLEYFPSQMLRTGNNFTFSYTFEDVPFHSSYAHSQSLDRLMNPLIDQYLYYLSRTQTTGGTANTQTLGFSQGGPNTMANQAKNWLPGPCYRQQRVSTTTGQNNNSNFAWTAGTKYHLNGRNSLANPGIAMATHKDDKERFFPSNGILIFGKQNAARDNADYSDVMLTSEEEIKTTNPVATEEYGIVADNLQQQNTAPQIGTVNSQGALPGMVWQNRDVYLQGPIWAKIPHTDGNFHPSPLMGGFGLKHPPPQILIKNTPVPADPPTTFNQSKLNSFITQYSTGQVSVEIEWELQKENSKRWNPEIQYTSNYYKSTSVDFAVNTEGVYSEPHPIGTRYLTRPL

SEQ ID NO: 1589 - protein, 737 aa, Artificial Sequence
  Description of Artificial Sequence: Synthetic polypeptide
MAADGYLPDWLEDNLSEGIREWWDLKPGAPKPKANQQKQDDGRGLVLPGYKYLGPFNGLDKGEPVNAADAAALEHDKAYDQQLKAGDNPYLRYNHADAEFQERLQEDTSFGGNLGRAVFQAKKRVLEPFGLVEEGAKTAPGKKRPVEQSPQEPDSSSGIGKTGQQPAKKRLNFGQTGDSESVPDPQPLGEPPATPAAVGPTTMASGGGAPMQDNNEGADGVGSSSGNWHCDSTWLGDRVITTSTRTWALPTYNNHLYKQISNGTSGGATNDNTYFGYSTPWGYFDFNRFHCHFSPRDWQRLINNNWGFRPKRLNFKLFNIQVKEVTQNEGTKTIANNLTSTIQVFTDSEYQLPYVLGSAHQGCLPPFPADVFMIPQYGYLTLNNGSQAVGRSSFYCLEYFPSQMLRTGNNFTFSYTFEDVPFHSSYAHSQSLDRLMNPLIDQYLYYLSRTQTTGGTANTQTLGFSQGGPNTMANQAKNWLPGPCYRQQRVSTTTGQNNNSNFAWTAGTKYHLNGRNSLANPGIAMATHKDDKERFFPSNGILIFGKQNAARDNADYSDVMLTSEEEIKTTNPVATEEYGIVADNLQQQNTAPQIGTVNSQGALPGMVWQNRDVYLQGPIWAKIPHTDGNFHPSPLMGGFGLKHPPPQILIKNTPVPADPPTTFNQSKLNSFITQYSTGQVSVEIEWELQKENSKRWNPEIQYTSNYYKSTSVDFAVNTEGVYSEPHPIGTRYLTRPL

SEQ ID NO: 1590 - protein, 736 aa, Artificial Sequence
  Description of Artificial Sequence: Synthetic polypeptide
MAADGYLPDWLEDNLSEGIREWWALKPGAPKPKANQQKQDDGRGLVLPGYKYLGPFNGLDKGEPVNAADAAALEHDKAYDQQLKAGDNPYLRYNHADAEFQERLQEDTSFGGNLGRAVFQAKKRVLEPLGLVEEGAKTAPGKKRPVEQSPQEPDSSSGIGKTGQQPAKKRLNFGQTGDSESVPDPQPLGEPPATPAAVGPTTMASGGGAPMADNNEGADGVGSSSGNWHCDSTWLGDRVITTSTRTWALPTYNNHLYKQISSASTGASNDNHYFGYSTPWGYFDFNRFHCHFSPRDWQRLINNNWGFRPKRLNFKLFNIQVKEVTDNNGVKTIANNLTSTVQVFTDSDYQLPYVLGSAHEGCLPPFPADVFMIPQYGYLTLNNGSQAVGRSSFYCLEYFPSQMLRTGNNFTFSYTFEDVPFHSSYAHSQSLDRLMNPLIDQYLYYLSRTQTTGGTANTQTLGFSQGGPNTMANQAKNWLPGPCYRQQRVSTTTGQNNNSNFAWTAGTKYHLNGRNSLANPGIAMATHKDDKERFFPSNGILIFGKQNAARDNADYSDVMLTSEEEIKTTNPVATEEYGIVADNLQQQNTAPQIGTVNSQGALPGMVWQNRDVYLQGPIWAKIPHTDGNFHPSPLMGGFGLKHPPPQILIKNTPVPADPPTTFNQSKLNSFITQYSTGQVSVEIEWELQKENSKRWNPEIQYTSNYYKSTSVDFAVNTEGVYSEPHPIGTRYLTRPL

SEQ ID NO: 1591 - protein, 737 aa, Artificial Sequence
  Description of Artificial Sequence: Synthetic polypeptide
MAADGYLPDWLEDNLSEGIREWWDLKPGAPKPKANQQKQDDGRGLVLPGYKYLGPFNGLDKGEPVNAADAAALEHDKAYDQQLKAGDNPYLRYNHADAEFQERLQEDTSFGGNLGRAVFQAKKRVLEPLGLVEEGAKTAPGKKRPVEPSPQRSPDSSTGIGKKGQQPARKRLNFGQTGDSESVPDPQPLGEPPATPAAVGPTTMASGGGAPMADNNEGADGVGNASGNWHCDSTWLGDRVITTSTRTWALPTYNNHLYKQISSASTGASNDNHYFGYSTPWGYFDFNRFHCHFSPRDWQRLINNNLGSRPKRLNFKLFIIQVKEVTTNDGVTTIANNLTSTVQVFSDSEYQLPYVLGSAHQGCLPPFPADVFMIPQYGYLTLNNGSQAVGRSSFYCLEYFPSQMLRTGNNFTFSYTFEDVPFHSSYAHSQSLDRLMNPLIDQYLYYLNRTQNQSGSAQNKDLLFSRGSPAGMSVQPKNWLPGPCYRQQRVSKTKTDNNNSNFTWTGASKYNLNGRESIINPGTAMASHKDDKDKFFPMSGVMIFGKESAGASNTALDNVMITDEEEIKATNPVATERFGTVAVNLQSSSTDPATGDVHVMGALPGMVWQDRDVYLQGPIWAKIPHTDGHFHPSPLMGGFGLKHPPPQILIKNTPVPANPPAEFSATKFASFITQYSTGQVSVEIEWELQKENSKRWNPEVQYTSNYAKSANVDFTVDNNGLYTEPRPIGTRYLTRPL

SEQ ID NO: 1592 - protein, 736 aa, Artificial Sequence
  Description of Artificial Sequence: Synthetic polypeptide
MAADGYLPDWLEDNLSEGIREWWALKPGAPKPKANQQKQDDGRGLVLPGYKYLGPFNGLDKGEPVNAADAAALEHDKAYDQQLKAGDNPYLRYNHADAEFQERLQEDTSFGGNLGRAVFQAKKRLLEPLGLVEEAAKTAPGKKRPVEQSPQEPDSSSGIGKTGQQPAKKRLNFGQTGDSESVPDPQPIGEPPATPAAVGPTTMASGGGAPMADNNEGADGVGNSSGNWHCDSTWLGDRVITTSTRTWALPTYNNHLYKQISSASTGASNDNHYFGYSTPWGYFDFNRFHCHFSPRDWQRLINNNWGFRPKRLNFKLFNIQVKEVTQNEGTKTIANNLTSTIQVFTDSEYQLPYVLGSAHQGCLPPFPADVFMIPQYGYLTLNNGSQAVGRSSFYCLEYFPSQMLRTGNNFTFSYTFEDVPFHSSYAHSQSLDRLMNPLIDQYLYYLSRTQTTGGTANTQTLGFSQGGPNTMANQAKNWLPGPCYRQQRVSTTTGQNNNSNFAWTAGTKYHLNGRNSLANPGIAMATHKDDKERFFPSNGILIFGKQNAARDNADYSDVMLTSEEEIKTTNPVATEEYGIVADNLQQQNTAPQIGTVNSQGALPGMVWQNRDVYLQGPIWAKIPHTDGNFHPSPLMGGFGLKHPPPQILIKNTPVPADPPTTFNQSKLNSFITQYSTGQVSVEIEWELQKENSKRWNPEIQYTSNYYKSTSVDFAVNTEGVYSDPHPIGTRYLTRPL

SEQ ID NO: 1593 - protein, 736 aa, Artificial Sequence
  Description of Artificial Sequence: Synthetic polypeptide
MAADGYLPDWLEDNLSEGIREWWALKPGAPKPKANQQEQDDGRGLVLPGYKYLGPFNGLDKGEPVNAADAAALEHDKAYDQQLKAGDNPYLRYNHADAEFQERLQEDTSFGGNLGRAVFQAKKRVLEPFGLVEEGAKTAPGKKRPVEQSPQEPDSSSGIGKTGQQPAKKRLNFGQTGDSESVPDPQPLGEPPAAPSGVGPNTMAAGGGAPMADNNEGADGVGSSSGNWHCDSTWLGDRVITTSTRTWALPTYNNHLYKQISSASTGASNDNHYFGYSTPWGYFDFNRFHCHFSPRDWQRLINNNWGFRPKRLNFKLFNIQVKEVTQNEGTKTIANNLTSTIQVFTDSEYQLPYVLGSAHQGCLPPFPADVFMIPQYGYLTLNNGSQAVGRSSFFCLEYFPSQMLRTGNNFTFSYTFEDVPFHSSYAHSQSLDRLMNPLIDQYLYYLSRTQTTGGTANTQTLGFSQGGPNTMANQAKNWLPGPCYRQQRVSTTTGQNNNSNFAWTAGTKYHLNGRNSLANPGIAMATHKDDKERFFPSNGILIFGKQNAARDNADYSDVMLTSEEEIKTTNPVATEEYGIVADNLQQQNTAPQIGTVNSQGALPGMVWQNRDVYLQGPIWAKIPHTDGNFHPSPLMGGFGLKHPPPQILIKNTPVPADPPTTFNQSKLNSFITQYSTGQVSVEIEWELQKENSKRWNPEIQYTSNYYKSTSVDFAVNTEGVYSEPHPIGTRYLTRPL

SEQ ID NO: 1594 - protein, 736 aa, Artificial Sequence
  Description of Artificial Sequence: Synthetic polypeptide
MAADGYLPDWLEDNLSEGIREWWDLKPGAPKPKANQQKQDDGRGLVLPGYKYLGPFNGLDKGEPVNAADAAALEHDKAYDQQLKAGDNPYLRYNHADAEFQERLQEDTSFGGNLGRAVFQAKKRVLEPLGLVEEGAKTAPGKKRPVEQSPQEPDSSSGIGKTGQQPAKKRLNFGQTGDSESVPDPQPLGEPPATPAAVGPTTMASGGGAPMADNNEGADGVGNASGNWHCDSTWLGDRVITTSTRTWALPTYNNHLYKQISSASTGASNDNHYFGYSTPWGYFDFNRFHCHFSPRDWQRLINNNWGFRPKRLNFKLFNIQVKEVTTNDGVTTIANNLTSTVQVFSDSEYQLPYVLGSAHQGCLPPFPADVFMIPQYGYLTLNNGSQAVGRSSFYCLEYFPSQMLRTGNNFTFSYTFEDVPFHSSYAHSQSLDRLMNPLIDQYLYYLNRTQNQSGSAQNKDLLFSRGSPAGMSVQPKNWLPGPCYRQQRVSKTKTDNNNSNFTWTGASKYNLNGRESIINPGTAMASHKDDKDKFFPMSGVMIFGKESAGASNTALDNVMITDEEEIKATNPVATERFGTVAVNLQNSSTDPATGDVHVMGALPGMVWQDRDVYLQGPIWAKIPHTDGHFHPSPLMGGFGLKHPPPQILIKNTPVPANPPAEFSATKFASFITQYSTGQVSVEIEWELQKENSKRWNPEVQYTSNYAKSANVDFTVDNNGLYTVPRPIGTRYLTRPL

SEQ ID NO: 1595 - protein, 736 aa, Artificial Sequence
  Description of Artificial Sequence: Synthetic polypeptide
MAADGYLPDWLEDNLSEGIREWWALKPGAPKPKANQQKQDDGRGLVLPGYKYLGPFNGLDKGEPVNAADAAALEHDKAYDQQLKAGDNPYLRYNHADAEFQERLQEDTSFGGNLGRAVFQAKKRLLEPLGLVEEGAKTAPGKKRPVEQSPQEPDSSSGIGKTGEQPAKKRLNFGQTGDSESVPDPQPLGEPPATPAAVGPTTMASGGGAPMADNNEGADGVGSASGNWHCDSTWLGDRVITTSTRTWALPTYNNHLYKQISSASTGASNDNHYFGYSTPWGYFDFNRFHCHFSPRDWQRLINNNWGFRPKRLNFKLFNIQVKEVTDNNGVKTIANNLTSTIQVFTDSEYQLPYVLGSAHQGCLPPFPADVFMIPQYGYLTLNNGSQAVGRSSFYCLEYFPSQMLRTGNNFPFSYTFEDVPFHSSYAHSQSLDRLMNPLIDQYLYYLSRTQTTGGTANTQTLGFSQGGPNTMANQAKNWLPGPCYRQQRVSTTTGQNNNSNFAWTAGTKYHLNGRNSLANPGIAMATHKDDKERFFPSNGILIFGKQNAARDNADYSDVMLTSEEEIKTTNPVATEEYGIVADNLQQQNTAPQIGTVNSQGALPGMVWQNRDVYLQGPIWAKIPHTDGNFHPSPLMGGFGLKHPPPQILIKNTPVPADPPTTFNQSKLNSFITQYSTGQVSVEIEWELQKENSKRWNPEIQYTSNYYKSTSVDFAVNTEGVYSEPHPIGTRYLTRPL

SEQ ID NO: 1596 - protein, 736 aa, Artificial Sequence
  Description of Artificial Sequence: Synthetic polypeptide
MAADGYLPDWLEDNLSEGIREWWALKPGAPKPKANQQKQDDGRGLVLPGYKYLGPFNGLDKGEPVNAADAAALEHDKAYDQQLKAGDNPYLRYNHADAEFQERLQEDTSFGGNLGRAVFQAKKRVLEPLGLVEEGAKTAPGKKRPVEQSPQEPDSSSGIGKTGQQPAKKRLNFGQTGDSESVPDPQPLGEPPATPAAVGPTTMASGGGAPMADNNEGADGVGSSSGNWHCDSQWLGDRVITTSTRTWALPTYNNHLYKQISSASTGASNDNHYFGYSTPWGYFDFNRFHCHFSPRDWQRLINNNWGFRPKRLNFKLFNIQVKEVTDNNGVKTIANNLTSTVQVFTDSEYQLPYVLGSAHQDCLPPFPADVFMIPQYGYLTLNNGSQAVGRSSFYCLEYFPSQMLRTGNNFTFSYTFEDVPFHSSYAHSQSLDRLMNPLIDQYLYYLSRTQTTGGTANTQTLGFSQGGPNTMANQAKNWLPGPCYRQQRVSTTTGQNNNSNFAWTAGTKYHLNGRNSLANPGIAMATHKDDKERFFPSNGILIFGKQNAARDNADYSDVMLTSEEEIKTTNPVATEEYGIVADNLQQQNTAPQIGTVNSQGALPGMVWQNRDVYLQGPIWAKIPHTDGNFHPSPLMGGFGLKHPPPQILIKNTPVPADPPTTFNQSKLNSFITQYSTGQVSVEIEWELQKENSKRWNPEIQYTSNYYKSTSVDFAVNTEGVYSEPHPIGTRYLTRPL

SEQ ID NO: 1597 - protein, 735 aa, Artificial Sequence
  Description of Artificial Sequence: Synthetic polypeptide
MAADGYLPDWLEDNLSEGIREWWDLKPGAPKPKANQQKQDDGRGLVLPGYKYLGPFNGLDKGEPVNAADAAALEHDKAYDQQLKAGDNPYLRYNHADAEFQERLQEDTSFGGNLGRAVFQAKKRVLEPLGLVEEGAKTAPGKKRPVEQSPQEPDSSSGIGKTGQQPAKKRLNFGQTGDSESVPDPQPLGEPPATPAAVGPTTMASGGGAPMADNNEGADGVGNASGNWHCDSTWLGDVITTSTRTWALPTYNNHLYKQISSASTGASNDNHYFGYSTPWGYFDFNRFHCHFSPRDWQRLINNNWGFRPKRLNFKLFNIQVKEVTQNEGTKTIANNLTSTIQVFTDSEYQLPYVLGSAHQGCLPPFPADVFMIPQYGYLTLNNGSQAVGRSSFYCLEYFPSQMLRTGNNFQFTYTFEDVPFHSSYAHSQSLDRLMNPLIDQYLYYLSRTQTTGGTANTQTLGFSQGGPNTMANQAKNWLPGPCYRQQRVSTTTGQNNNSNFAWTAGTKYHLNGRNSLANPGIAMATHKDDKERFFPSNGILIFGKQNAARDNADYSDVILTSEEEIKTTNPVATEEYGIVADNLQQQNTAPQIGTVNSQGALPGMVWQNRDVYLQGPIWAKIPHTDGNFHPSPLMGGFGLKHPPPQILIKNTPVPADPPTTFNQSKLNSFITQYSTGQVSVEIEWELQKENSKRWNPEIQYTSNYYKSTSVDFAVNTEGVYSEPHPIGTRYLTRPL

SEQ ID NO: 1598 - protein, 736 aa, Artificial Sequence
  Description of Artificial Sequence: Synthetic polypeptide
MAADGYLPDWLEDTLSEGIRQWWKLKPGPPPPKPAERHKDDSRGLVLPGYKYLGPFNGLDKGEPVNEADAAALEHDKAYDRQLDSGDNPYLKYNHADAEFQERLKEDTSFGGNLGRAVFQAKKRVLEPFGLVEEGAKTAPGKKRPVEQSPQEPDSSSGIGKTGQQPAKKRLNFGQTGDSESVPDPQPLGEPPATPAAVGPTTMASGGGAPMADNNEGADGVGNASGNWHCDSTWLGDRVITTSTRTWALPTYNNHLYKQISSTSTGASNDNHYFGYSTPWGYFDFNRFHCHFSPRDWQRLINNNWGFRPKRLNFKLFNIQVKEVTDNNGVKTIANNLTSTVQVFTDSEYQLPYVLGSAHQGCLPPFPADVFMIPQYGYLTLNNGSQAVGRSSFYCLEYFPSQMLRTGNNFTFSYTFEDVPFHSSYAHSQSLDRLMNPLIDQYLYYLSRTQTTGGTANTQTLGFSQGGPNTMANQAKNWLPGPCYRQQRVSTTTGQNNNSNFAWTAGTKYHLNGRNSLANPGIAMATHKDDKERFFPSNGILIFGKQNAARDNADYSDVMLTSEEEIKTTNPVATEEYGIVADNLQQQNTAPQIGTVNSQGALPGMVWQNRDVYLQGPIWAKIPHTDGNFHPSPLMGGFGLKHPPPQILIKNTPVPADPPTTFNQSKLNSFITQYSTGQVSVEIEWELQKENSKRWNPEIQYTSNYYKSTSVDFAVNTEGVYSEPHPIGTRYLTRPL

SEQ ID NO: 1599 - protein, 735 aa, Artificial Sequence
  Description of Artificial Sequence: Synthetic polypeptide
MAADGYLPDWLEDNLSEGIREWWDLKPGAPKPKANQQKQDDGRGLVLPGYKYLGPFNGLDKGEPVNAADAAALEHDKAYDRQLDSGDNPYLRYNHADAEFQERLKEDTSFGGNLGRAVFQAKKRVLEPFGLVEEGAKTAPGKKRPVEQSPQEPDSSSGIGKTGQQPAKKRLNFGQTGDSESVPDPQPLGEPPATPAAVGPTTMASGGGAPMADNNEGADGVGNASGNWHCDSTWLGDRVITTSTRTWALPTYNNHLYKQISSASTGASNDNHYFGYSTPWGYFDFNRFHCHFSPRDWQRLINNNWGFRPKRLNFKLFNIQVKEVTQNEGTKTIANNLTSTIQVFTDSEYQLPYVLGSAHQGCLPPFPADVFMIPQYGYLTLNNGSQAVGRSSFYCLEYFPSQMLRTGNNFQFTYTFEDVPFHSSYAHSQSLDRLMNPLIDQYLYYLSRTQTTGGTANTQTLGFSQGGPNTMANQAKNWLPGPCYRQQRVSTTTGQNNNSNFAWTAGTKYHLNGRNSLANPGIAMATHKDDRSVFFQYRDPDFGKQNAARDNADYSDVMLTSEEEIKTTNPVATEEYGIVADNLQQQNTAPQIGTVNSQGALPGMVWQNRDVYLQGPIWAKIPHTDGNFHPSPLMGGFGLKHPPPQILIKNTPVPADPPTTFNQSKLNSFITQYSTGQVSVEIEWELQKENSKRWNPEIQYTSNYYKSTSVDFAVNTEGVYSEPHPIGTRYLTRPL

SEQ ID NO: 1600 - protein, 736 aa, Artificial Sequence
  Description of Artificial Sequence: Synthetic polypeptide
MAADGYLPDWLEDNLSEGIREWWALKPGAPKPKANQQKQDDGRGLVLPGYKYLGPFNGLDKGEPVNAADAAALEHDKAYDQQLKAGDNPYLKYNHADAEFQERLQGDTSFGGNLGRAVFQAKKRVLEPLGLVEEAAKTAPGKKRPVEQSPQEPDSSAGIGKSGAQPAKKRLNFGQTGDTESVPDPQPLGEPPAAPSGVGPNTMAAGGGAPMADNNEGADGVGSSSGNWHCDSQWLGDRVITTSTRTWALPTYNNHLYKQISSASTGASNDNHYFGYSTPWGYFDFNRFHCHFSPRDWQRLINNNWGFRPKRLNFKLFNIQVKEVTDNNGVKTIANNLTSTVQVFTDSDYQLPYVLGSAHEGCLPPFPADVFMIPQYGYLTLNNGSQAVGRSSFYCLEYFPSQMLRTGNNFQFTYTFEDVPFHSSYAHSQSLDRLMNPLIDQYLYYLSRTQTTGGTANTQTLGFSQGGPNTMANQAKNWLPGPCYRQQRVSTTTGQNNNSNFAWTAGTKYHLNGRNSLANPGIAMATHKDDKERFFPSNGILIFGKQNAARDNADYSDVMLTSEEEIKTTNPVATEEYGIVADNLQQQNTAPQIGTVNSQGALPGMVWQNRDVYLQGPIWAKIPHTDGNFHPSPLMGGFGLKHPPPQILIKNTPVPADPPTTFNQSKLNSFITQYSTGQVSVEIEWELQKENSKRWNPEIQYTSNYYKSTSVDFAVNTEGVYSEPHPIGTRYLTRPL

SEQ ID NO: 1601 - protein, 736 aa, Artificial Sequence
  Description of Artificial Sequence: Synthetic polypeptide
MAADGYLPDWLEDTLSEGIRQWWKLKPGPPPPKPAERHKDDSRGLVLPGYKYLGPFNGLDKGEPVNEADAAALEHDKAYDRQLDSGDNPYLKYNHADAEFQERLKEDTSFGGNLGRAVFQAKKRVLEPFGLVEEAAKTAPGKKRPVEQSPQEPDSSSGIGKTGQQPAKKRLNFGQTGDSESVPDPQPLGEPPATPAAVGPTTMASGGGAPMADNNEGADGVGNASGNWHCDSTWLGDRVITTSTRTWALPTYNNHLYKQISSASTGASNDNHYFGYSTPWGYFDFNRFHCHFSPRDWQRLINNNWGFRPKRLNFKLFNIQVKEVTDNNGVKTIANNLTSTVQVFTDSDYQLPYVLGSAHEGCLPPFPADVFMIPQYGYLTLNNGSQAVGRSSFYCLEYFPSQMLRTGNNFTFSYTFEDVPFHSSYAHSQSLDRLMNPLIDQYLYYLSRTQTTGGTANTQTLGFSQGGPNTMANQAKNWLPGPCYRQQRVSTTTGQNNNSNFAWTAGTKYHLNGRNSLANPGIAMATHKDDKERFFPSNGILIFGKQNAARDNADYSDVMLTSEEEIKTTNPVATEEYGIVADNLQQQNTAPQIGTVNSQGALPGMVWQNRDVYLQGPIWAKIPHTDGNFHPSPLMGGFGLKHPPPQILIKNTPVPADPPTTFNQSKLNSFITQYSTGQVSVEIEWELQKENSKRWNPEIQYTSNYYKSTSVDFAVNTEGVYSEPHPIGTRYLTRPL

SEQ ID NO: 1602 - protein, 736 aa, Artificial Sequence
  Description of Artificial Sequence: Synthetic polypeptide
MAADGYLPDWLEDNLSEGIREWWALKPGAPKPKANQQKQDDGRGLVLPGYKYLGPFNGLDKGEPVNAADAAALEHDKAYDQQLKAGDNPYLRYNHADAEFQERLQEDTSFGGNLGRAVFQAKKRVLEPLGLVEEGAKTAPGKKRPVEQSPQEPDSSSGIGKTGQQPAKKRLNFGQTGDSESVPDPQPLGEPPATPAAVGPTTMASGGGAPMADNNEGADGVGSSSGNWHCDSTWLGDRVITTSTRTWALPTYNNHLYKQISSASTGASNDNHYFGYSTPWGYFDFNRFHCHFSPRDWQRLINNNWGFRPKRLNFKLFNIQVKEVTDNNGVKTIANNLTSTVQVFTDSEYQLPYVLGSAHQGCLPPFPADVFMIPQYGYLTLNNGSQAVGRSSFYCLEYFPSQMLRTGNNFTFSYTFEDVPFHSSYAHSQSLDRLMNPLIDQYLYYLSRTQTTGGTANTQTLGFSQGGPNTMANQAKNWLPGPCYRQQRVSTTTGQNNNSNFAWTAGTKYHLNGRNSLANPGIAMATHKDDKERFFPSNGILIFGKQNAARDNADYSDVMLTSEEEIKTTNPVATEEYGIVADNLQQQNTAPQIGTVNSQGALPGMVWQNRDVYLQGPIWAKIPHTDGNFHPSPLMGGFGLKHPPPQILIKNTPVPADPPTTFNQSKLNSFITQYSTGQVSVEIEWELQKENSKRWNPEIQYTSNYYKSTSVDFAVNTEGVYSEPHPIGTRYLTRPL

SEQ ID NO: 1603 - protein, 737 aa, Artificial Sequence
  Description of Artificial Sequence: Synthetic polypeptide
MAADGYLPDWLEDNLSEGIREWWALKPGAPKPKANQQKQDDGRGLVLPGYKYLGPFNGLDKGEPVNAADAAALEHDKAYDQQLKAGDNPYLRYNHADAEFQERLQEDTSFGGNLGRAVFQAKKRVLEPLGLVEEGAKTAPGKKRPVEQSPQEPDSSSGIGKTGQQPAKKRLNFGQTGDTESVPDPQPIGEPPAAPSGVGSLTMASGGGAPVADNNEGADGVGSSSGNWHCDSQWLGDRVITTSTRTWALPTYNNHLYKQISNSTSGGSSNDNAYFGYSTPWGYFDFNRFHCHFSPRDWQRLINNNWGFRPKRLNFKLFNIQVKEVTQNEGTKTIANNLTSTIQVFTDSEYQLPYVLGSAHQGCLPPFPADVFMIPQYGYLTLNNGSQAVGRSSFYCLEYFPSQMLRTGNNFQFTYTFEDVPFHSSYAHSQSLDRLMNPLIDQYLYYLSRTQTTGGTANTQTLGFSQGGPNTMANQAKNWLPGPCYRQQRVSTTTGQNNNSNFAWTAGTKYHLNGRNSLANPGIAMATHKDDKERFFPSNGILIFGKQNAARDNADYSDVMLTSEEEIKTTNPVATEEYGIVADNLQQQNTAPQIGTVNSQGALPGMVWQNRDVYLQGPIWAKIPHTDGNFHPSPLMGGFGLKHPPPQILIKNTPVPADPPTTFNQSKLNSFITQYSTGQVSVEIEWELQKENSKRWNPEIQYTSNYYKSTSVDFAVNTEGVYSEPHPIGTRYLTRPL

SEQ ID NO: 1604 - protein, 736 aa, Artificial Sequence
  Description of Artificial Sequence: Synthetic polypeptide
MAADGYLPDWLEDNLSEGIREWWALKPGAPKPKANQQKQDDGRGLVLPGYKYLGPFNGLDKGEPVNAADAAALEHDKAYDQQLKAGDNPYLKYNHADAEFQERLQGDTSFGGNLGRAVFQAKKRVLEPLGLVEEAAKTAPGKKRPVEQSPQEPDSSAGIGKSGAQPAKKRLNFGQTGDTESVPDPQPLGEPPAAPSGVGPNTMAAGGGAPMADNNEGADGVGSSSGNWHCDSQWLGDRVITTSTRTWALPTYNNHLYKQISSASTGASNDNHYFGYSTPWGYFDFNRFHCHFSPRDWQRLINNNWGFRPKRLNFKLFNIQVKEVTDNNGVKTIANNLTSTVQVFTDSEYQLPYVLGSAHQGCLPPFPADVFMIPQYGYLTLNNGSQAVGRSSFYCLEYFPSQMLRTGNNFTFSYTFEDVPFHSSYAHSQSLDRLMNPLIDQYLYYLSRTQTTGGTANTQTLGFSQGGPNTMANQAKNWLPGPCYRQQRVSTTTGQNNNSNFAWTAGTKYHLNGRNSLANPGIAMATHKDDKERFFPSNGILIFDKQNAARDNADYSDVMLTSEEEIKTTNPVATEEYGIVADNLQQQNTAPQIGTVNSQGALPGMVWQNRDVYLQGPIWAKIPHTDGNFHPSPLMGGFGLKHPPPQILIKNTPVPADPPTTFNQSKLNSFITQYSTGQVSVEIEWELQKENSKRWNPEIQYTSNYYKSTSVDFAVNTEGVYSEPHPIGTRYLTRPL

SEQ ID NO: 1605 - protein, 736 aa, Artificial Sequence
  Description of Artificial Sequence: Synthetic polypeptide
MAADGYLPDWLEDTLSEGIRQWWKLKPGPPPPKPAERHKDDSRGLVLPGYKYLGPFNGLDKGEPVNEADAAALEHDKAYDRQLDSGDNPYLKYNHADAEFQERLKEDTSFGGNLGRAVFQAKKRVLEPLGLVEEPVKTAPGKKRPVEHSPVEPDSSSGTGKAGQQPARKRLNFGQTGDSESVPDPQPLGEPPATPAAVGPNTMATGSGAPMADNNEGADGVGNSSGNWHCDSTWMGDRVITTSTRTWALPTYNNHLYKQISSASTGASNDNHYFGYSTPWGYFDFNRFHCHFSPRDWQRLINNNWGFRPKRLNFKLFNIQVKEVTDNNGVKTIANNLTSTIQVFTDSEYQLPYVLGSAHQGCLPPFPADVFMIPQYGYLTLNNGSQAVGRSSFYCLEYFPSQMLRTGNNFTFSYTFEDVPFHSSYAHSQSLDRLMNPLIDQYLYYLSRTQTTGGKANTQTLGFSQGGPNTMANQAKNWLPGPCYRQQRVSTTTGQNNNSNFAWTAGTKYHLNGRNSLANPGIAMATHKDDKERFFPSNGILIFGKQNAARDNADYSDVMLTSEEEIKTTNPVATEEYGIVADNLQQQNTAPQIGTVNSQGALPGMVWQNRDVYLQGPIWAKIPHTDGNFHPSPLMGGFGLKHPPPQILIKNTPVPADPPTTFNQSKLNSFITQYSTGQVSVEIEWELQKENSKRWNPEIQYTSNYYKSTSVDFAVNTEGVYSEPHPIGTRYLTRPL

SEQ ID NO: 1606 - protein, 736 aa, Artificial Sequence
  Description of Artificial Sequence: Synthetic polypeptide
MAADGYLPDWLEDNLSEGIREWWALKPGAPKPKANQQKQDDGRGLVLPGYKYLGPFNGLDKGEPVNAADAAALEHDKAYDQQLKAGDNPYLRYNHADAEFQERLQEDTSFGGNLGRAVFQAKKRVLEPFGLVEEGAKTAPGKKRPVEQSPQEPDSSSGIGKTGQQPAKKRLNFGQTGDSESVPDPQPLGEPPATPAAVGPTTMASGGGAPMADNNEGADGVGNASGNWHCDSTWLGDRVITTSTRTWALPTYNNHLYKQISSASTGASNDNHYFGYSTPWGYFDFNRFHCHFSPRDWQRLINNNWGFRPKRLNFKLFNIQVKEVTDNNGVKTIANNLTSTVQVFTDSEYQLPYVLGSAHQGCLPPFPADVFMIPQYGYLTLNNGSQAVGRSSFYCLEYFPSQMLRTGNNFTFSYTFEDVPFHSSYAHSQSLDRLMNPLIDQYLYYLSRTQTTGGTGNTQTLGFSQGGPNTMANQAKNWLPGPCYRQQRVSTTTGQNNNSNFAWTAGTKYHLNGRNSLANPGIAMATHKDDKERFFPSNGILIFGKQNAARDNADYSDVMLTSEEEIKTTNPVATEEYGIVADNLQQQNTAPQIGTVNSQGALPGMVWQNRDVYLQGPIWAKIPHTDGNFHPSPLMGGFGLKHPPPQILIKNTPVPADPPTTFNQSKLNSFITQYSTGQVSVEIEWELQKENSKRWNPEIQYTSNYYKSTSVDFAVNTEGVYSEPHPIGTRYLTRPL

SEQ ID NO: 1607 - protein, 736 aa, Artificial Sequence
  Description of Artificial Sequence: Synthetic polypeptide
MAADGYLPDWLEDNLSEGIREWWDLKPGAPKPKANQQKQDDGRGLVLPGYKYLGPFNGLDKGEPVNAADAAALEHDKAYDQQLKAGDNPYLRYNHADAEFQERLQEDTSFGGNLGRAVFQAKKRVLEPLGLVEEGAKTAPGKKRPVEQSPQEPDSSSGIGKTGQQPAKKRLNFGQTGDSESVPDPQPLGEPPATPAAVGPTTMASGGGAPMADNNEGADGVGSSSGNWHCDSTWLGDRVITTSTRTWALPTYNNHLYKQISSASTGASNDNHYFGYSTPWGYFDFNRFHCHFSPRDWQRLINNNWGFRPKRLNFKLFNIQVKEVTQNEGTKTIANNLTSTIQVFTDSEYQLPYVLGSAHQGCLPPFPADVFMIPQYGYLTLNNGSQAVGRSSFYCLEYFPSQMLRTGNNFTFSYTFEDVPFHSSYAHSQSLDRLMNPLIDQYLYYLSRTQTTGGTANTQTLGFSQGGPNTMANQAKNWLPGPCYRQQRVSTTTGQNNNSNFAWTAGTKYHLNGRNSLANPGIAMATHKDDKERFFPSNGILIFGKQNAARDNADYSDVMLTSEEEIKTTNPVATEEYGIVADNLQQQNTAPQIGTVNSQGALPGMVWQNRDVYLQGPIWAKIPHTDGNFHPSPLMGGFGLKHPPPQILIKNTPVPADPPTTFNQSKLNSFITQYSTGQVSVEIEWELQKENSKRWNPEIQYTSNYYKSTSVDFAVNTEGVYSEPHPIGTRYLTRPL

SEQ ID NO: 1608 - protein, 736 aa, Artificial Sequence
  Description of Artificial Sequence: Synthetic polypeptide
MAADGYLPDWLEDNLSEGIREWWALKPGAPKPKANQQKQDDGRGLVLPGYKYLGPFNGLDKGEPVNAADAAALEHDKAYDQQLKAGDNPYLRYNHADAEFQERLQEDTSFGGNLGRAVFQAKKRVLEPLGLVEEGAKTAPGKKRPVEQSPQEPDSSSGIGKTGQQPAKKRLNFGQTGDSESVPDPQPLGEPPATPAAVGPTTMAAGGGAPMADNNEGADGVGSSSGNWHCDSTWMGDRVITTSTRTWALPTYNNHLYKQISSASTGASNDNHYFGYSTPWGYFDFNRFHCHFSPRDWQRLINNNWGFRPKRLSFKLFNIQVKEVTQNEGTKTIANNLTSTIQVFTDSEYQLPYVLGSAHQGCLPPFPADVFMIPQYGYLTLNNGSQAVGRSSFYCLEYFPSQMLRTGNNFTFSYTFEDVPFHSSYAHSQSLDRLMNPLIDQYLYYLSRTQTTGGTANTQTLGFSQGGPNTMANQAKNWLQGPCYRQQRVSTTTGQNNNSNFAWTAGTKYHLNGRNSLANPGIAMATHKDDKERFFPSNGILIFGKQNAARDNADYSDVMLTSEEEIKTTNPVATEEYGIVADNLQQQNTAPQIGTVNSQGALPGMVWQNLDVYLQGPIWAKIPHTDGNFHPSPLMGGFGLKHPPPQILIKNTPVPADPPTTFNQSKLNSFITQYSTGQVSVEIEWELQKENSKRWNPEIQYTSNYYKSTSVDFAVNTEGVYSEPHPIGTRYLTRPL

SEQ ID NO: 1609 - protein, 737 aa, Artificial Sequence
  Description of Artificial Sequence: Synthetic polypeptide
MAADGYLPDWLEDNLSEGIREWWALKPGAPKPKANQQKQDDGRGLVLPGYKYLGPFNGLDKGEPVNAADAAALEHDKAYDQQLKAGDNPYLRYNHADAEFQERLQEDTSFGGNLGRAVFQAKKRVLEPLGLVEEGAKTAPGKKRPVEPSPQRSPDSSSGIGKTGQQPAKKRLNFGQTGDSESVPDPQPLGEPPATPAAVGPTTMASGGGAPMADNNEGADGVGNASGNWHCDSQWLGDRVITTSTRTWALPTYNNHLYKQISSASTGASNDNHYFGYSTPWGYFDFNRFHCHFSPRDWQRLINNNWGFRPKRLNFKLFNIQVKEVTDNNGVKTIANNLTSTVQVFTDSDYQLPYVLGSAHEGCLPPFPADVFMIPQYGYLTLNNGSQAVGRSSFYCLEYFPSQMLRTGNNFQFTYTFEDVPFHSSYAHSQSLDRLMNPLIDQYLYYLSRTQTTGGTANTQTLGFSQGGPNTMANQAKNWVPGPCYRQQRVSTATGQNNNSNFAWTAGTKYHLKGRNSLANPGIAMATHKDDKERFFPSNGILIFGKQNAARDNADYSDVMLTSEEEIKTTNPVATEEYGIVADNLQQQNTAPQIGTVNSQGALPGMVWQNRDVYLQGPIWAKIPHTDGNFHPSPLMGGFGLKHPPPQILIKNTPVPADPPTTFNQSKLNSFITQYSTGQVSVEIEWELQKENSKRWNPEIQYTSNYYKSTSVDFAVNTEGVYSEPHPIGTRYLTRPL

SEQ ID NO: 1610 - protein, 737 aa, Artificial Sequence
  Description of Artificial Sequence: Synthetic polypeptide
  misc_feature (226)..(226): Xaa can be any naturally occurring amino acid
  misc_feature (233)..(233): Xaa can be any naturally occurring amino acid
  misc_feature (239)..(239): Xaa can be any naturally occurring amino acid
  misc_feature (250)..(250): Xaa can be any naturally occurring amino acid
  misc_feature (253)..(253): Xaa can be any naturally occurring amino acid
  misc_feature (255)..(255): Xaa can be any naturally occurring amino acid
MAADGYLPDWLEDTLSEGIRQWWKLKPGPPPPKPAERHKDDSRGLVLPGYKYLGPFNGLDKGEPVNEADAAALEHDKAYDRQLDSGDNPYLKYNHADAEFQERLKEDTSFGGNLGRAVFQAKKRVLEPLGLVEEGAKTAPGKKRPVEQSPQEPDSSSGIGKTGQQPAKKRLNFGQTGDSESVPDPQPLGEPPATPSGVGPNTMAAGGGAPMADNNEGADGVGSSSXNWHCDSXWLGDRXITTSTRTWALXTYXNXLYKQISNSTSGGATNDNTYFGYSTPWGYFDFNRFHCHFSPRDWQRLINNNWGFRPKRLNFKLFNIQVKEVTQNEGTKTIANNLTSTIQVFTDSEYQLPYVLGSAHQGCLPPFPADVFMIPQYGYLTLNNGSQAVGRSSFYCLEYFPSQMLRTGNNFQFTYTFEDVPFHSSYAHSQSLDRLMNPLIDQYLYYLSRTQTTGGTANTQTLGFSQGGPNTMANQAKNWLPGPCYRQQRVSTTTGQNNNSNFAWTAGTKYHLNGRNSLANPGIAMATHKDDKERFFPSNGILIFGKQNAARDNADYSDVMLTSEEEIKTTNPVATEEYGIVADNLQQQNTAPQIGTVNSQGALPGMVWQNRDVYLQGPIWAKIPHTDGNFHPSPLMGGFGLKHPPPQILIKNTPVPADPPTTFSQAKLASFITQYSTGQVSVEIEWELQKENSKRWNPEVQYTSNYAKSANVDFTVDNNGLYTEPRPIGTRYLTRPL

SEQ ID NO: 1611 - protein, 737 aa, Artificial Sequence
  Description of Artificial Sequence: Synthetic polypeptide
MAADGYLPDWLEDNLSEGIREWWDLKPGAPKPKANQQKQDDGRGLVLPGYKYLGPFNGLDKGEPVNAADAAALEHDKAYDQQLKAGDNPYLRYNHADAEFQERLQEDTSFGGNLGRAVFQAKKRVLEPLGLVEEGAKTAPGKKRPVEPSPQRSPDSSTGIGKKGQQPAKKRLNFGQTGDSESVPDPQPIGEPPAGPSGVGSLTMASGGGAPVADNNEGADGVGSSSGNWHCDSQWLGDRVITTSTRTWALPTYNNHLYKQISSASTGASNDNHYFGYSTPWGYFDFNRFHCHFSPRDWQRLINNNWGFRPKRLNFKLFNIQVKEVTDNDGVKTIANNLTSTIQVFTDSEYQLPYVLGSAHQGCLPPFPADVFMIPQYGYLTLNNGSQAVGRSSFYCLEYFPSQMLRTGNNFTFSYTFEDVPFHSSYAHSQSLDRLMNPLIDQYLYYLSRTQTTGGTANTQTLGFSQGGPNTMANHAKNWLPGPCYRQQRVSTTTGQNNNSNFAWTAGTKYHLNGRNSLANPGIAMATHKDDKERFFPSNGILIFGKQNAARDNADYSDVMLTSEEEIKTTNPVATEEYGIVADNLQQQNTAPQIGTVNSQGALPGMVWQNRDVYLQGPIWAKIPHTDGNFHPSPLMGGFGLKHPPPQILIKNTPVPADPPTTFNQSKLNSFITQYSTGQVSVEIEWELQKENSKRWNPEIQYTSNYYKSTSVDFAVNTEGVYSEPHPIGTRYLTRPL

SEQ ID NO: 1612 - protein, 736 aa, Artificial Sequence
  Description of Artificial Sequence: Synthetic polypeptide
MAADGYLPDWLEDTLSEGIRQWWKLKPGPPPPKPAERHKDDSRGLVLPGYKYLGPFNGLDKGEPVNEADAAALEHDKAYDRQLDSGDNPYLKYNHADAEFQERLKEDTSFGGNLGRAVFQAKKRVLEPLGLVEEPVKTAPGKKRPVEHSPVEPDSSSGTGKAGQQPAKKRLNFGQTGDSESVPDPQPLGEPPATPAAVGPTTMASGGGAPMADNNEGADGVGNASGNWHCDSTWLGDRVITTSTRTWALPTYNNHLYKQISSASTGASNDNHYFGYSTPWGYFDFNRFHCHFSPRDWQRLINNNWGFRPKRLNFKLFNIQVKEVTQNEGTKTIANNLTSTIQVFTDSEYQLPYVLGSAHQGCLPPFPADVFMIPQYGYLTLNNGSQAVGRSSFYCLEYFPSQMLRTGNNFQFTYTFEDVPFHSSYAHSQSLDRLMNPLIDQYLYYLSRTQTTGGTANTQTLGFSQGGPNTMANQAKNWLPGPCYRQQRVSTTTGQNNNSNFAWTAGTKYHLNGRNSLANPGIAMATHKDDKERFFPSNGILIFGKQNAARDNADYSDVMLTSEEEIKTTNPVATEEYGIVADNLQQQNTAPQIGTVNSQGALPGMVWQNRDVYLQGPIWAKIPHTDGNFHPSPLMGGFGLKHPPPQILIKNTPVPADPPTTFNQSKLNSFITQYSTGQVSVEIEWELQKENSKRWNPEIQYTSNYYKSTSVDFAVNTEGVYSEPHPIGTRYLTRPL

SEQ ID NO: 1613 - protein, 736 aa, Artificial Sequence
  Description of Artificial Sequence: Synthetic polypeptide
MAADGYLPDWLEDNLSEGIREWWALKPGAPKPKANQQKQDDGRGLVLPGYKYLGPFNGLDKGEPVNAADAAALEHDKAYDQQLQAGDNPYLRYNHADAEFQERLQGDTSFGGNLGRAVFQAKKRVLEPLGLVEEGAKTAPGKKRPVEQSPQEPDSSSGIGKTGQQPAKKRLNFGQTGDSESVPDPQPLGEPPATPAAVGPTTMASGGGAPMADNNEGADGVGNASGNWHCDSTWLGDRVITTSTRTWALPTYNNHLYKQISSASTGASNDNHYFGYSTPWGYFDFNRFHCHFSPRDWQRLINNNWGFRPKRLNFKLFNIQVKEVTDNNGVKTIANNLTSTIQVFTDSEYQLPYVLGSAHQGCLPPFPADVFMIPQYGYLTLNNGSQAVGRSSFYCLEYFPSQMLRTGNNFQFTYTFEDVPFHSSYAHSQSLDRLMNPLIDQYLYYLSRTQTTGGTANTQTLGFSQGGPNTMANQAKNWLPGPCYRQQRVSTTTGQNNNSNFAWTAGTKYHLNGRNSLANPGIAMATHKDDKERFFPSNGILIFGKQNAARDNADYSDVMLTSEEEIKTTNPVATEEYGIVADNLQQQNTAPQIGTVNSQGALPGMVWQNRDVYLQGPIWAKIPHTDGNFHPSPLMGGFGLKHPPPQILIKNTPVPADPPTTFNQSKLNSFITQYSTGQVSVEIEWELQKENSKRWNPEIQYTSNYYKSTSVDFAVNTEGVYSEPHPIGTRYLTRPL

SEQ ID NO: 1614 - protein, 738 aa, Artificial Sequence
  Description of Artificial Sequence: Synthetic polypeptide
MAADGYLPDWLEDTLSEGIRQWWKLKPGPPPPKPAERHKDDSRGLVLPGYKYLGPFNGLDKGEPVNAADAAALEHDKAYDQQLKAGDNPYLRYNHADAEFQERLKEDTSFGGNLGRAVFQAKKRVLEPLGLVEEGAKTAPGKKRPVEPSPQRSPDSSTGIGKKGQQPARKRLNFGQTGDSESVPDPQPLGEPPAAPSGVGPNTMAAGGGAPMADNNEGADGVGSSSGNWHCDSQWLGDRVITTSTRTWALPTYNNHLYKQISNSTSGGSSNDNAYFGYSTPWGYFDFNRFHCHFSPRDWQRLINNNWGFRPKRLNFKLFNIQVKEVTDNNGVKTIANNLTSTVQVFTDSEYQLPYVLGSAHQGCLPPFPADVFMIPQYGYLTLNNGSQAVGRSSFYCLEYFPSQMLRTGNNFTFSYTFEDVPFHSSYAHSQSLDRLMNPLIDQYLYYLSRTQTTGGTANTQTLGFSQGGPNTMANQAKNWLPGPCYRQQRVSTTTGQNNNSNFAWTAGTKYHLNGRNSLANPGIAMATHKDDKERFFPSNGILIFGKQNAARDNADYSDVMLTSEEEIKTTNPVATEEYGIVADNLQQQNTAPQIGTVNSQGALPGMVWQNRDVYLQGPIWAKIPHTDGHFHPSPLMGGFGLKHPPPQILIKNTPVPANPPTTFNQSKLNSFITQYSTGQVSVEIEWELQKENSKRWNPEVQYTSNYAKSANVDFTVDNNGLYTEPRPIGTRYLTRPL

SEQ ID NO: 1615 - protein, 738 aa, Artificial Sequence; identical to SEQ ID NO: 1614
  Description of Artificial Sequence: Synthetic polypeptide

SEQ ID NO: 1616 - protein, 736 aa, Artificial Sequence
  Description of Artificial Sequence: Synthetic polypeptide
MAADGYLPDWLEDNLSEGIREWWALKPGAPKPKANQQKQDDGRGLVLPGYKYLGPFNGLDKGEPVNAADAAALEHDKAYDQQLKAGDNPYLRYNHADAEFQERLQEDTSFGGNLGRAVFQAKKRLLEPLGLVEEGAKTAPGKKRPVEQSPQEPDSSSGIGKTGQQPAKKRLNFGQTGDSESVPDPQPLGEPPATPAAVGPTTMASGGGAPMADNNEGADGVGNSSGNWHCDSTWMGDRVITTSTRTWALPTYNNHLYKQISSASTGASNDNHYFGYSTPWGYFDFNRFHCHFSPRDWQRLINNNWGFRPKRLNFKLFNIQVKEVTQNEGTKTIANNLTSTIQVFTDSEYQLPYVLGSAHQGCLPPFPADVFIIPQYGYLTLNNGSQAVGRSSFYCLEYFPSQMLRTGNNFTFSYTFEDVPFHSSYAHSQSLDRLMNPLIDQYLYYLSRTQTTGGTANTQTLGFSQGGPNTMANQAKNWLPGPCYRQQRVSTTTGQNNNSNFAWTAGTKYHLNGRNSLANPGIAMATHKDDKERFFPSNGILIFGKQNAARDNADYSDVMLTSEEEIKTTNPVATEEYGIVADNLQQQNTAPQIGTVNSQGALPGMVWQNRDVYLQGPIWAKIPHTDGNFHPSPLMGGFGLKHPPPQILIKNTPVPADPPTTFNQSKLNSFITQYSTGQVSVEIEWELQKENSKRWNPEIQYTSNYYKSTSVDFAVNTEGVYSEPHPIGTRYLTRPL

SEQ ID NO: 1617 - protein, 736 aa, Artificial Sequence
  Description of Artificial Sequence: Synthetic polypeptide
MAADGYLPDWLEDNLSEGIREWWALKPGAPKPKANQQKQDDGRGLVLPGYKYLGPFNGLDKGEPVNAADAAALEHDKAYDQQLKAGDNPYLRYNHADAEFQERLQEDTSFGGNLGRAVFQAKKRVLEPFGLVEEAAKTAPGKKRPVEQSPQEPDSSSGIGKTGQQPAKKRLNFGQTGDSESVPDPQPLGEPPATPAAVGPTTMASGGGAPMADNNEGADGVGNASGNWHCDSTWLGDRVITTSTRTWALPTYNNHLYKQISSASTGASNDNHYFGYSTPWGYFDFNRFHCHFSPRDWQRLINNNWGFRPKRLNFKLFNIQVKEVTQNEGTKTIANNLTSTIQVFTDSEYQLPYVLGSAHQGCLPPFPADVFMIPQYGYLTLNNGSQAVGRSSFYCLEYFPSQMLRTGNNFTFSYTFEDVPFHSSYAHSQSLDRLMNPLIDQYLYYLSRTQTTGGTANTQTLGFSQGGPNTMANHAKNWLPGPCYRQQRVSTTTGQNNNSNFAWTAGTKYHLNGRNSLANPGIAMATHKDDKERFFPSNGILIFGKQNAARDNADYSDVMLTSEEEIKTTNPVATEEYGIVADNLQQQNTAPQIGTVNSQGALPGMVWQNRDVYLQGPIWAKIPHTDGNFHPSPLMGGFGLKHPPPQILIKNTPVPADPPTTFNQSKLNSFITQYSTGQVSVEIEWELQKENSKRWNPEIQYTSNYYKSTSVDFAVNTEGVYSEPHPIGTRYLTRPL

SEQ ID NO: 1618 - protein, 736 aa, Artificial Sequence
  Description of Artificial Sequence: Synthetic polypeptide
MAADGYLPDWLEDNLSEGIREWWALKPGAPKPKANQQKQDDGRGLVLPGYKYLGPFNGLDKGEPVNEADAAALEHDKAYDQQLKAGDNPYLRYNHADAEFQERLQEDTSFGGNLGRAVFQAKKRLLEPLGLVEEAAKTAPGKKRPVEQSPQEPDSSAGIGKSGAQPAKKRLNFGQTGDSESVPDPQPLGEPPATPAAVGPTTMASGGGAPMADNNEGADGVGNASGNWHCDSTWLGDRVITTSTRTWALPTYNNHLYKQISSASTGASNDNHYFGYSTPWGYFDFNRFHCHFSPRDWQRLINNNWGFRPKRLNFKLFNIQVKEVTDNDGVKTIANNLTSTIQVFTDSEYQLPYVLGSAHQGCLPPFPADVFMIPQYGYLTLNNGSQAVGRSSFYCLEYFPSQMLRTGNNFQFTYTFEDVPFHSSYAHSQSLDRLMNPLIDQYLYYLSRTQTTGGTANTQTLGFSQGGPNTMANQAKNWLPGPCYRQQRVSTTTGQNNNSNFAWTAGTKYHLNGRNSLANPGIAMATHKDDKERFFPSNGILIFGKQNAARDNADYSDVMLTSEEEIKTTNPVATEEYGIVADNLQQQNTAPQIGTVNSQGALPGMVWQNRDVYLQGPIWAKIPHTDGNFHPSPLMGGFGLKHPPPQILIKNTPVPADPPTTFNQSKLNSFITQYSTGQVSVEIEWELQKENSKRWNPEIQYTSNYYKSTSVDFAVNTEGVYSEPHPIGTRYLTRPL

SEQ ID NO: 1619 - protein, 736 aa, Artificial Sequence
  Description of Artificial Sequence: Synthetic polypeptide
MAADGYLPDWLEDNLSEGIREWWALKPGAPKPKANQQKQDDGRGLVLPGYKYLGPFNGLDKGEPVNAADAAALEHDKAYDQQLKAGDNPYLRYNHADAEFQERLQEDTSFGGNLGRAVFQAKKRVLEPLGLVEEGAKTAPGKKRPVEQSPQEPDSSAGIGKTGAQPAKKRLNFGQTGDSESVPDPQPLGEPPATPAAVGPTTMASGGGAPMADNNEGADGVGSASGNWHCDSTWLGDRVITTSTRTWALPTYNNHLYKQISSASTGASNDNHYFGYSTPWGYFDFNRFHCHFSPRDWQRLINNNWGFRPKRLNFKLFNIQVKEVTDNNGVKTIANNLTSTIQVFTDSEYQLPYVLGSAHQGCLPPFPADVFMIPQYGYLTLNNGSQAVGRSSFYCLEYFPSQMLRTGNNFTFSYTFEDVPFHSSYAHSQSLDRLMNPLIDQYLYYLSRTQTTGGTANTQTLGFSQGGPNTMANQAKNWLPGPCYRQQRVSTTTGQNNNSNFAWTAGTKYHLNGRNSLANPGIAMATHKDDKERFFPSNGILIFGKQNAARDNADYSDVMLTSEEEIKTTNPVATEEYGIVADNLQQQNTAPQIGTVNSQGALPGMVWQNRDVYLQGPIWAKIPHTDGNFHPSPLMGGFGLKHPPPQILIKNTPVPADPPTTFNQSKLNSFITQYSTGQVSVEIEWELQKENSKRWNPEIQYTSNYYKSTSVDFAVNTEGVYSEPHPIGTRYLTRPL

SEQ ID NO: 1620 - protein, 736 aa, Artificial Sequence
  Description of Artificial Sequence: Synthetic polypeptide
MAADGYLPDWLEDNLSEGIREWWDLKPGAPKPKANQQKQDDGRGLVLPGYKYLGPFNGLDKGEPVNAADAAALEHDKAYDQQLKAGDNPYLRYNHADAEFQERLQEDTSFGGNLGRAVFQAKKRLLEPLGLVEEAAKTAPGKKRPVEQSPQEPDSSAGIGKSGAQPAKKRLNFGQTGDTESVPDPQPIGEPPAAPSGVGPNTMAAGGGAPMADNNEGADGVGSSSGNWHCDSQWLGDRVITTSTRTWALPTYNNHLYKQISSASTGASNDNHYFGYSTPWGYFDFNRFHCHFSPRDWQRLINNNWGFRPKRLNFKLFNIQVKEVTQNEGTKTIANNLTSTIQVFTDSEYQLPYVLGSAHQGCLPPFPADVFMIPQYGYLTLNNGSQAVGRSSFYCLEYFPSQMLRTGNNFQFTYTFEDVPFHSSYAHSQSLDRLMNPLIDQYLYYLSRTQTTGGTANTQTLGFSQGGPNTMANHAKNWLPGPCYRQQRVSTTTGQNNNSNFAWTAGTKYHLNGRNSLANPGIAMATHKDDKERFFPSNGILIFGKQNAARDNADYSDVMLTSEEEIKTTNPVATEEYGIVADNLQQQNTAPQIGTVNSQGALPGMVWQNRDVYLQGPIWAKIPHTDGNFHPSPLMGGFGLKHPPPQILIKNTPVPADPPTTFNQSKLNSFITQYSTGQVSVEIEWELQKENSKRWNPEIQYTSNYYKSTSVDFAVNTEGVYSEPHPIGTRYLTRPL

SEQ ID NO: 1621 - protein, 737 aa, Artificial Sequence; identical to SEQ ID NO: 1603
  Description of Artificial Sequence: Synthetic polypeptide

SEQ ID NO: 1622 - protein, 737 aa, Artificial Sequence
  Description of Artificial Sequence: Synthetic polypeptide
MAADGYLPDWLEDNLSEGIREWWALKPGAPKPKANQQKQDDGRGLVLPGYKYLGPFNGLDKGEPVNAADAAALEHDKAYDQQLKAGDNPYLRYNHADAEFQERLKEDTSFGGNLGRAVFQAKKRVLEPFGLVEEGAKTAPGKKRPVEQSPQEPDSSSGIGKTGQQPAKKRLNFGQTGDSESVPDPQPLGEPPAAPSGVGPNTMAAGGGAPMADNNEGADGVGSSSGNWHCDSQWLGNRVITTSTRTWALPTYNNHLYKQISNSTSGGSSNDNAYFGYSTPWGYFDFNRFHCHFSPRDWQRLINNNWGFRPKRLNFKLFNIQVKEVTDNNGVKTIANNLTSTVQVFTDSEYQLPYVLGSAHQGCLPPFPADVFMIPQYGYLTLNNGSQAVGRSSFYCLEYFPSQMLRTGNNFQFTYTFEDVPFHSSYAHSQSLDRLMNPLIDQYLYYLSRTQTTGGTANTQTLGFSQGGPNTMANQAKNWLPGPCYRQQRVSTTTGQNNNSNFAWTAGTKYHLNGRNSLANPGIAMATHKDDKERFFPSNGILIFGKQNAARDNADYSDVMLTSEEEIKTTNPVATEEYGIVADNLQQQNTAPQIGTVNSQGALPGMVWQNRDVYLQGPIWAKIPHTDGNFHPSPLMGGFGLKHPPPQILIKNTPVPADPPTTFNQSKLNSFITQYSTGQVSVEIEWELQKENSKRWNPEIQYTSNYYKSTSVDFAVNTEGVYSEPHPIGTRYLTRPL

SEQ ID NO: 1623 - protein, 736 aa, Artificial Sequence
  Description of Artificial Sequence: Synthetic polypeptide
MAADGYLPDWLEDNLSEGIREWWDLKPGAPKPKANQQKQDDGRGLVLPGYKYLGPFNGLDRGEPVNAADAAALEHDKAYDQQLKAGDNPYLRYNHADAEFQERLQEDTSFGGNLGRAVFQAKKRVLEPLGLVEEGAKTAPGKKRPVEQSPQEPDSSSGIGKTGQQPAKKRLNFGQTGDSESVPDPQPLGEPPATPAAVGPTTMASGGGAPMADNNEGADGVGNASGNWHCDSTWLGDRVITTSTRTWALPTYNNHLYKQISSASTGASNDNHYFGYSTPWGYFDFNRFHCHFSPRDWQRLINNNWGFRPKRLNFKLFNIQVKEVTDNNGVKTIANNLTSTIQVFTDSEYQLPYVLGSAHQGCLPPFPADVFMIPQYGYLTLNNGSQAVGRSSFYCLEYFPSQMLRTGNNFQFTYTFEDVPFHSSYAHSQSLDRLMNPLIDQYLYYLSRTQTTGGTANTQTLGFSQGGPNTMANQAKNWLPGPCYRQQRVSTTTGQNNNSNFAWTAGTKYHLNGRNSLANPGIAMATHKDDKERFFPSNGILIFGKQNAARDNADYSDVMLTSEEEIKTTNPVATEEYGIVADNLQQQNTAPQIGTVNSQGALPGMVWQNRDVYLQGPIWAKIPHTDGNFHPSPLMGGFGLKHPPPQILIKNTPVPADPPTTFNQSKLNSFITQYSTGQVSVEIEWELQKENSKRWNPEIQYTSNYYKSTSVDFAVNTEGVYSEPHPIGTRYLTRPL

SEQ ID NO: 1624 - protein, 736 aa, Artificial Sequence
  Description of Artificial Sequence: Synthetic polypeptide
MAADGYLPDWLEDNLSEGIREWWDLKPGAPKPKANQQKQDDGRGLVLPGYKYLGPFNGLDKGEPVNAADAAALEHDKAYDQQLKAGDNPYLRYNHADAEFQERLQEDTSFGGNLGRAVFQAKKRVLEPLGLVEEGAKTAPGKKRPVEQSPQEPDSSSGIGKKGQQPARKRLNFGQTGDSESVPDPQPLGEPPAAPSGVGSLTMASGGGAPMADNNEGADGVGNASGNWHCDSTWLGDRVITTSTRTWALPTYNNHLYKQISSASTGASNDNHYFGYSTPWGYFDFNRFHCHFSPRDWQRLINNNWGFRPKRLNFKLFNIQVKEVTQNEGTKTIANNLTSTVQVFTDSDYQLPYVLGSAHQGCLPPFPADVFMIPQYGYLTLNNGSQAVGRSSFYCLEYFPSQMLRTGNNFQFTYTFEDVPFHSSYAHSQSLDRLMNPLIDQYLYYLSRTQTTGGTANTQTLGFSQGGPNTMANQAKNWLPGPCYRQQRVSTTTGQNNNSNFAWTAGTKYHLNGRNSLSNPGIAMATHKDDKERFFPSNGILIFGKQNAARDNADYSDVMLTSEEEIKTTNPVATEEYGIVADNLQQQNTAPQIGTVNSQGALPGMVWQNRDMYLQGPIWAKIPHTDGNFHPSPLMGGFGLKHPPPQILIKNTPVPADPPTTFNQSKLNSFITQYSTGQVSVEIEWELQKENSKRWNPEIQYTSNYYKSTSVDFAVNTEGVYSEPHPIGTRYLTRPL

SEQ ID NO: 1625 - protein, 736 aa, Artificial Sequence
  Description of Artificial Sequence: Synthetic polynucleotide
MAADGYLPDWLEDNLSEGIREWWALKPGAPKPKANQQKQDDGRGLVLPGYKYLGPFNGLDKGEPVNAADAAALEHDKAYDQQLKAGDNPYLRYNHADAEFQERLQEDTSFGGNLGRAVFQAKKRVLEPFGLVEEGAKTAPGKKRPVEQSPQEPDSSSGIGKTGQQPAKKRLNFGQTGGSESVPDPQPLGEPPATPAAVGPTTMAAGGGAPMADNNEGADGVGSSSGNWHCDSTWLGDRVITTSTRTWALPTYNNHLYKQISSASTGASNDNHYFGYSTPWGYFDFNRFHCHFSPRDWQRLINNNWGFRPKRLNFKLFNIQVKEVTDNNGVKTIANNLTSTVQVFTDSEYQLPYVLGSAHQGCLPPFPADVFMIPQYGYLTLNNGSQAVGRSSFYCLEYFPSQMLRTGNNFTFSYTFEEVPFHSSYAHSQSLDRLMNPLIDQYLYYLSRTQTTGGTANTQTLGFSQGGPNTMANQAKNWLPGPCYRQQRVSTTTGQNNNSNFAWTAGTKYHLNGRNSLANPGIAMASHKDDKERFFPSNGILIFGKQNAARDNADYSDVMLTSEEEIKTTNPVATEEYGIVADNLQQQNTAPQIGTVNSQGALPGMVWQNRDVYLQGPIWAKIPHTDGNFHPSPLMGGFGLKHPPPQILIKNTPVPADPPTTFNQSKLNSFITQYSTGQVSVEIEWELQKENSKRWNPEIQYTSNYYKSTSVDFAVNTEGVYSEPHPIGTRYLTRPL

SEQ ID NO: 1626 - DNA, 2211 bp, Artificial Sequence
  Description of Artificial Sequence: Synthetic polynucleotide
atggctgccgatggttatcttccagattggctcgaggacaacctctctgagggcattcgcgagtggtgggacttgaaacctgcatccccgaaacccaaagccaaccagcaaaagcaggacgacggccggggtctggtgcttcctggctacaagtacctcggacccttcaacggactcgacaagggggagcccgtcaacgcggcggacgcagcggccctcgagcacgacaaggcctacgaccagcagctcaaagcgggtgacaatccgtacctgcggtataaccacgccgacgccgagtttcaggagcgtctgcaagaagatacgtcttttgggggcaacctcgggcgagcagtcttccaggccaaaaagaggcttcttgaacctcttggtctggttgaggaagcggctaagacggctcctggaaagaagaggcctgtagagcagtctcctcaggaaccggactcctccgcgggtattggcaaatcgggtgcacagcccgccaaaaagagactcaatttcggtcagactggcggcacagagtcagttccagaccctcaacctctcggagaacctccagcagcgccctctggtgtgggacctaatacaatggctgcaggcggtggcgcaccaatggcagacaataacgaaggcgccgacggagtgggtagttcctcgggaaattggcattgcgattccacatggctgggcgacagagtcatcaccaccagcaccagaacctgggccctgcccacttacaacaaccatctctacaagcaaatctccagtgcttcaacgggggccagcaacgacaaccactacttcggctacagcaccccctgggggtattttgatttcaacagattccactgccacttctcaccacgtgactggcagcgactcatcaacaacaactggggattccggcccaagagactcagcttcaagctcttcaacatccaggtcaaggaggtcacgcagaatgaaggcaccaagaccatcgccaataacctcaccagcaccatccaggtgtttacggactcggagtaccagctgccgtacgttctcggctctgcccaccagggctgcctgcctccgttcccggcggacgtgttcatgattccccagtacggatacctaacactcaacaacggtagtcaggccgtgggacgctcctccttctactgcctggaatactttccttcgcagatgctgagaaccggcaacaacttccagtttacttacaccttcgaggacgtgcctttccacagcagctacgcccacagccagagcttggaccggctgatgaatcctctgattgaccagtacctgtactacttgtctcggactcaaacaacaggaggcacggcaaatacgcagactctgggcttcagccaaggtgggcctaatacaatggccaatcaggcaaagaactggctgccaggaccctgttaccgccaacaacgcgtctcaacgacaaccgggcaaaacaacaatagcaactttgcctggactgctgggaccaaataccatctgaatggaagaaattcattggctaatcctggcatcgctatggcaacacacaaagacgacaaggagcgtttttttcccagtaacgggatcctgatttttggcaaacaaaatgctgccagagacaatgcggattacagcgatgtcatgctcaccagcgaggaagaaatcaaaaccactaaccctgtggctacagaggaatacggtatcgtggcagataacttgcagcagcaaaacacggctcctcaaattggaactgtcaacagccagggggccttacccggtatggtctggcagaaccgggacgtgtacctgcagggtcccatctgggccaagattcctcacacggacggcaacttccacccgtctccgctgatgggcggctttggcctgaaacatcctccgcctcagatcctgatcaagaacacgcctgtacctgcggatcctccgaccaccttcaaccagtcaaagctgaactctttcatcacgcaatacagcaccggacaggtcagcgtggaaattgaatgggagctgcagaaggaaaacagcaagcgctggaaccccgagatccagtacacctccaactactacaaatctacaagtgtggactttgctgttaatacagaaggcgtgtactctgaaccccaccccattggcacccgttacctcacccgtcccctgtaa

SEQ ID NO: 1627 - DNA, 2211 bp, Artificial Sequence
  Description of Artificial Sequence: Synthetic polynucleotide
atggctgccgatggttatcttccagattggctcgaggacaacctctctgagggcattcgcgagtggtgggacttgaaacctggagccccgaaacccaaagccaaccagcaaaagcaggacgacggccggggtctggtgcttcctggctacaagtacctcggacccttcaacggactcgacaagggggagcccgtcaacgcggcggacgcagcggccctcgagcacgacaaggcctacgaccagcagctcaaagcgggtgacaatccgtacctgcggtataaccacgccgacgccgagtttcaggagcgtctgcaagaagatacgtcttttgggggcaacctcgggcgagcagtcttccaggccaagaagagggttctcgaaccttttggtctggttgaggaaggcgctaagacggctcctggaaagaaacgtccggtagagcagtcgccacaagagccagactcctcctcgggcattggcaagacaggccagcagcccgctaaaaagagactcaattttggtcagactggcgactcagagtcagtccccgacccacaacctctcggagaacctccagcaacccccgctgctgtgggacctactacaatggcttcaggtggtggcgcaccaatggcagacaataacgaaggcgccgacggagtgggtaatgcctcaggaaattggcattgcgattcccaatggctgggggacagagtcatcaccaccagcacccgaacctgggccctgcccacctacaacaatcacctctacaagcaaatctccagtgcttcaacgggggccagcaacgacaaccactacttcggctacagcaccccctgggggtattttgatttcaacagattccactgccatttctcaccacgtgactggcagcgactcatcaacaacaattggggattccggcccaagagactcaacttcaaactcttcaacatccaagtcaaggaggtcacgcagaatgaaggcaccaagaccatcgccaataacctcaccagcaccatccaggtgtttacggactcggagtaccagctgccgtacgttctcggctccgcccaccagggctgcctgcctccgttcccggcggacgtgttcatgattccccagtacggctacctaacactcaacaacggtagtcaggccgtgggacgctcctccttctactgcctggaatactttccttcgcagatgctgagaaccggcaacaacttccagtttacttacaccttcgaggacgtgcctttccacagcagctacgcccacagccagagcttggaccggctgatgaatcctctgattgaccagtacctgtactacttgtctcggactcaaacaacaggaggcacggcaaatacgcagactctgggcttcagccaaggtgggcctaatacaatggccaatcaggcaaagaactggctgccaggaccctgttaccgccaacaacgcgtctcaacgacaaccgggcaaaacaacaatagcaactttgcctggactgctgggaccaaataccatctgaatggaagaaattcattggctaatcctggcatcgctatggcaacacacaaagacgacaaggagcgtttttttcccagtaacgggatcctgatttttggcaaacaaaatgctgccagagacaatgcggattacagcgatgtcatgctcaccagcgaggaagaaatcaaaaccactaaccctgtggctacagaggaatacggtatcgtggcagataacttgcagcagcaaaacacggctcctcaaattggaactgtcaacagccagggggccttacccggtatggtctggcagaaccgggacgtgtacctgcagggtcccatctgggccaagattcctcacacggacggcaacttccacccgtctccgctgatgggcggctttggcctgaaacatcctccgcctcagatcctgatcaagaacacgcctgtacctgcggatcctccgaccaccttcaaccagtcaaagctgaactctttcatcacgcaatacagcaccggacaggtcagcgtggaaattgaatgggagctgcagaaggaaaacagcaagcgctggaaccccgagatccagtacacctccaactactacaaatctacaagtgtggactttgctgttaatacagaaggcgtgtactctgaaccccaccccattggcacccgttacctcacccgtcccctgtaa

SEQ ID NO: 1628 - DNA, 2211 bp, Artificial Sequence
  Description of Artificial Sequence: Synthetic polynucleotide
atggctgccgatggttatcttccagattggctcgaggacaacctctctgagggcattcgcgagtggtgggacttggaacctggagccccgaagcccaaagccaaccagcaaaagcaggacgacggccggggtctggtgcttcctggctacaagtacctcggacccttcaacggactcgacaagggggagcccgtcaacgcggcggacgcagcggccctcgagcacgacaaggcctacgaccagcagctcaaagcgggtgacaatccgtacctgcggtataaccacgccgacgccgagtttcaggagcgtctgcaagaagatacgtcttttgggggcaacctcgggcgagcagtcttccaggccaagaagcgggttctcgaacctctcggtctggttgaggaaggcgctaagacggctcctggaaagaaacgtccggtagagcagtcgccacaagagccagactcctcctcgggcatcggcaagacaggccagcagcccgctaaaaagagactcaattttggtcagactggcgactcagagtcagtccccgatccacaacctctcggagaacctccagcaacccccgctgctgtgggacctactacaatggcttcaggcggtggcgcaccaatggcagacaataacgaaggcgccgacggagtgggtaatgcctcaggaaattggcattgcgattccacatggctgggcgacagagtcatcaccaccagcacccgcacctgggccttgcccacctacaataaccacctctacaagcaaatctccagtgcttcaacaggggccagcaacgacaaccactacttcggctacagcaccccctgggggtattttgacttcaacagattccactgccacttctcaccacgtgactggcagcgactcatcaacaacaactggggattccggcctaagcgactcaacttcaagctcttcaacattcaggtcaaagaggttacggacaacaatggagtcaagaccatcgccaataaccttaccagcacggtccaggtcttcacggactcggagtaccagttgccgtacgtcctcggctctgcgcaccagggctgcctccctccgttcccggcggacgtgttcatgattccgcagtacggctacctaacgctcaacaacggtagtcaggccgtgggacgctcctccttctactgcctggaatactttccttcgcagatgctgagaaccggcaacaacttccagtttacttacaccttcgaggacgtgcctttccacagcagctacgcccacagccagagcttggaccggctgatgaatcctctgattgaccagtacctgtactacttgtctcggactcaaacaacaggaggcacggcaaatacgcagactctgggcttcagccaaggtgggcctaatacaatggccaatcaggcaaagaactggctgccaggaccctgttaccgccaacaacgcgtctcaacgacaaccgggcaaaacaacaatagcaactttgcctggactgctgggaccaaataccatctgaatggaagaaattcattggctaatcctggcatcgctatggcaacacacaaagacgacaaggagcgtttttttcccagtaacgggatcctgatttttggcaaacaaaatgctgccagagacaatgcggattacagcgatgtcatgctcaccagcgaggaagaaatcaaaaccactaaccctgtggctacagaggaatacggtatcgtggcagataacttgcagcagcaaaacacggctcctcaaattggaactgtcaacagccagggggccttacccggtatggtctggcagaaccgggacgtgtacctgcagggtcccatctgggccaagattcctcacacggacggcaacttccacccgtctccgctgatgggcggctttggcctgaaacatcctccgcctcagatcctgatcaagaacacgcctgtacctgcggatcctccgaccaccttcaaccagtcaaagctgaactctttcatcacgcaatacagcaccggacaggtcagcgtggaaattgaatgggagctgcagaaggaaaacagcaagcgctggaaccccgagatccagtacacctccaactactacaaatctacaagtgtggactttgctgttaatacagaaggcgtgtactctgaaccccaccccattggcacccgttacctcacccgtcccctgtaa

SEQ ID NO: 1629 - DNA, 2211 bp, Artificial Sequence
  Description of Artificial Sequence: Synthetic polynucleotide
atggctgccgatggttatcttccagattggctcgaggacactctctctgaaggaataagacagtggtggaagctcaaacctggcccaccaccaccaaagcccgcagagcggcataaggacgacagcaggggtcttgtgcttcctgggtacaagtacctcggacccttcaacggactcgacaagggagagccggtcaacgaggcagacgccgcggccctcgagcacgacaaagcctacgaccggcagctcgacagcggagacaacccgtacctcaagtacaaccacgccgacgcggagtttcaggagcgccttaaagaagatacgtcttttgggggcaacctcgggcgagcagtcttccaggccaagaagagggttctcgaaccttttggtctggttgaggaaggtgctaagacggctcctggaaagaaacgtccggtagagcagtcgccacaagagccagactcctcctcgggcattggcaagacaggccagcagcccgctaaaaagagactcaattttggtcagactggcgactcagagtcagtccccgacccacaacctctcggagaacctccagcaacccccgctgctgtgggacctactacaatggcttcaggcggtggcgcaccaatggcagacaataacgaaggcgccgacggagtgggtaatgcctcaggaaattggcattgcgattccacatggctgggcgacagagtcatcaccaccagcacccgaacatgggccttgcccacctataacaaccacctctacaagcaaatctccagtgcttcaacgggggccagcaacgacaaccactacttcggctacagcaccccctgggggtattttgacttcaacagattccactgccacttctcaccacgtgactggcagcgactcatcaacaacaactggggattccggcctaagcgactcaacttcaagctcttcaacattcaggtcaaagaggttacggacaacaatggagtcaagaccatcgccaataaccttaccagcacggtccaggtcttcacggactcagactatcagctcccgtacgtgctcgggtcggctcacgagggctgcctcccgccgttcccagcggacgttttcatgattcctcagtacggctacctaacactcaacaacggtagtcaggccgtgggacgctcctccttctactgcctggaatactttccttcgcagatgctgagaaccggcaacaacttccagtttacttacaccttcgaggacgtgcctttccacagcagctacgcgcacagccagagtctggaccggctgatgaatcctctgattgaccagtacctgtactacttgtctcggactcaaacaacaggaggcacggcaaatacgcagactctgggcttcagccaaggtgggcctaatacaatggccaatcaggcaaagaactggctgccaggaccctgttaccgccaacaacgcgtctcaacgacaaccgggcaaaacaacaatagcaactttgcctggactgctgggaccaaataccatctgaatggaagaaattcattggctaatcctggcatcgctatggcaacacacaaagacgacaaggagcgtttttttcccagtaacgggatcctgattttcggcaaacaaaatgctgccagagacaatgcggattacagcgatgtcatgctcaccagcgaggaagaaatcaaaaccactaaccctgtggctacagaggaatacggtatcgtggcagataacttgcagcagcaaaacacggctcctcaaattggaactgtcaacagccagggggccttacccggtatggtctggcagaaccgggacgtgtacctgcagggtcccatctgggccaagattcctcacacggacggcaacttccacccgtctccgctgatgggcggctttggcctgaaacatcctccgcctcagatcctgatcaagaacacgcctgtacctgcggatcctccgaccaccttcaaccagtcaaagctgaactctttcatcacgcaatacagcaccggacaggtcagcgtggaaattgaatgggagctgcagaaggaaaacagcaagcgctggaaccccgagatccagtacacctccaactactacaaatctacaagtgtggactttgctgttaatacagaaggcgtgtactctgaaccccaccccattggcaccagatacctgactcgtaatctgtaa

SEQ ID NO: 1630 - DNA, 2208 bp, Artificial Sequence
  Description of Artificial Sequence: Synthetic polynucleotide
atggctgccgatggttatcttccagattggctcgaggacactctctctgaaggaataagacagtggtggaagctcaaacctggcccaccaccaccaaagcccgcagagcggcataaggacgacagcaggggtcttgtgcttcctgggtacaagtacctcggacccttcaacggactcgacaagggagagccggtcaacgaggcagacgccgcggccctcgagcacgacaaagcctacgaccggcagctcgacagcggagacaacccgtacctcaagtacaaccacgccgacgcggagtttcaggagcgccttaaagaagatacgtcttttgggggcaacctcggacgagcagtcttccaggcgaaaaagagggttcttgaacctctgggcctggttgaggaacctgttaagacggctccgggaaaaaagaggccggtagagcagtcgccacaagagccagactcctcctcgggcatcggcaagaaaggccagcagcccgctaaaaagagactcaattttggtcagactggcgactcagagtcagtccccgacccacaacctctcggagaacctccagcaacccccgctgctgtgggacctactacaatggcttcaggcggtggcgcaccaatggcggacaataacgaaggcgccgatggagtgggtaatgcctcaggaaattggcattgcgattccacatggctgggcgacagagtcatcaccaccagcacccgaacatgggccttgcccacctataacaaccacctctacaagcaaatctccagtgcttcaacgggggccagcaacgacaaccactacttcggctacagcaccccctgggggtattttgacttcaacagattccactgccacttctcaccacgtgactggcagcgactcatcaacaacaactggggattccggcctaagcgactcaacttcaagctcttcaacattcaggtcaaagaggttacggacaacaatggagtcaagaccatcgccaataaccttaccagcacggtccaggtcttcacggactcagactatcagctcccgtacgttctcggctctgcccaccagggctgcctgcctccgttcccggcggacgtgttcatgattccccagtacggctacctaacactcaacaacggtagtcaggccgtgggacgctcctccttctactgcctggaatactttccttcgcagatgctgagaaccggcaacaacttccagtttacttacaccttcgaggacgtgcctttccacagcagctacgcccacagccagagcttggaccggctgatgaatcctctgattgaccagtacctgtactacttgtctcggactcaaacaacaggaggcacggcaaatacgcagactctgggcttcagccaaggtgggcctaatacaatggccaatcaggcaaagaactggctgccaggaccctgttaccgccaacaacgcgtctcaacgacaaccgggcaaaacaacaatagcaactttgcctggactgctgggaccaaataccatctgaatggaagaaattcattggctaatcctggcatcgctatggcaacacacaaagacgacaaggagcgtttttttcccagtaacgggatcctgatttttggcaaacaaaatgctgccagagacaatgcggattacagcgatgtcatgctcaccagcgaggaagaaatcaaaaccactaaccctgtggctacagaggaatacggtatcgtggcagataacttgcagcagcaaaacacggctcctcaaattggaactgtcaacagccagggggccttacccggtatggtctggcagaaccgggacgtgtacctgcagggtcccatctgggccaagattcctcacacggacggcaacttccacccgtctccgctgatgggcggctttggcctgaaacatcctccgcctcagatcctgatcaagaacacgcctgtacctgcggatcctccgaccaccttcaaccagtcaaagctgaactctttcatcacgcaatacagcaccggacaggtcagcgtggaaattgaatgggagctgcagaaggaaaacagcaagcgctggaaccccgagatccagtacacctccaactactacaaatctacaagtgtggactttgctgttaatacagaaggcgtgtactctgaaccccaccccattggcacccgttacctcacccgtcccctg

SEQ ID NO: 1631 - DNA, 2211 bp, Artificial Sequence
  Description of Artificial Sequence: Synthetic polynucleotide
atggctgccgatggttatcttccagattggctcgaggacactctctctgaaggaataagacagtggtggaagctcaaacctggcccaccaccaccaaagcccgcagagcggcataaggacgacagcaggggtcttgtgcttcctgggtacaagtacctcggacccttcaacggactcgacaagggagagccggtcaacgaggcagacgccgcggccctcgagcacgacaaagcctacgaccagcagctccaagcgggtgacaatccgtacctgcggtataaccacgccgacgccgagtttcaggagcgtcttcaaggagatacgtcttttgggggcaacctcggacgagcagtcttccaggccaaaaagaggcttcttgaacctcttggtctggttgaggaagcggctaagacggctcctggaaagaagaggcctgtagagcagtctcctcaggaaccggactcctccgcgggtattggcaaatcgggtgcacagcccgctaaaaagagactcaatttcggtcagactggcgacacagagtcagtcccagaccctcaaccaatcggagaacctcccgcagccccctcaggtgtgggatctcttacaatggcttcaggtggtggcgcaccagtggcagacaataacgaaggtgccgatggagtgggtagttcctcgggaaattggcattgcgattcccaatggctgggggacagagtcatcaccaccagcacccgaacatgggccttgcccacctataacaaccacctctacaagcaaatctccagtgcttcaacgggggccagcaacgacaaccactacttcggctacagcaccccctgggggtattttgacttcaaccgcttccactgccacttctcaccacgtgactggcagcgactcatcaacaacaactggggattccggcccaagagactcagcttcaagctcttcaaccatccaggtcaaggaggtcacgcagaatgaaggcaccaagaccatcgccaataacctcaccagcacatccaggtgtttacggactcggagtaccagctgccgtacgttctcggctctgcccaccagggctgcctgcctccgttcccggcggacgtgttcatgattccccagtacggctacctaacactcaacaacggtagtcaggccgtgggacgctcctccttctactgcctggaatactttccttcgcagatgctgagaaccggcaacaacttccagttcacttacaccttcgaggacgtgcctttccacagcagctacgcgcacagccagagcttggaccggctgatgaatcctctgattgaccagtacctgtactacttgtctcggactcaaacaacaggaggcacggcaaatacgcagactctgggcttcagccaaggtgggcctaatacaatggccaatcaggcaaagaactggctgccaggaccctgttaccgccaacaacgcgtctcaacgacaaccgggcaaaacaacaatagcaactttgcctggactgctgggaccaaataccatctgaatggaagaaattcattgggtaatcctggcatcgctatggcaacacacaaagacgacaaggagcgtttttttcccagtaacgggatcctgatttttggcaaacaaaatgctgccagagacaatgcggattacagcgatgtcatgctcaccagcgaggaagaaatcaaaaccactaaccctgtggctacagaggaatacggtatcgtggcagataacttgcagcagcaaaacacggctcctcaaattggaactgtcaacagccagggggccttacccggtatggtctggcagaaccgggacgtgtacctgcagggtcccatctgggccaagattcctcacacggacggcaacttccacccgtctccgctgatgggcggctttggcctgaaacatcctccgcctcagatcctcatcaaaaacacacctgtacctgcggatcctccaacggccttcaaccagtcaaagctgaactctttcatcacgcaatacagcaccggacaggtcagcgtggaaattgaatgggagctgcagaaggaaaacagcaagcgctggaaccccgagatccagtacacctccaactactacaaatctacaagtgtggactttgctgttaatacagaaggcgtgtactctgaaccccaccccattggcacccgttacctcacccgtcccctgtaa

SEQ ID NO: 1632 - DNA, 2214 bp, Artificial Sequence
  Description of Artificial Sequence: Synthetic polynucleotide
atggctgccgatggttatcttccagattggctcgaggacaacctctctgagggcattcgcgagtggtgggacttgaaacatggagccccgaaacccaaagccaaccagcaaaagcaggacgacggccggggtctggtgcttcctggctacaagtacctcggacccttcaacggactcgacaagggggagcccgtcaacgcggcggatgcagcggccctcgagcacgacaaggcctacgaccagcagctcaaagcgggtgacaatccgtacctgcggtataaccacgccgacgccgagtttcaggagcgtctgcaagaagatacgtcttttgggggcaacctcgggcgagcagtcttccaggccaagaagagggttctcgaaccttttggtctggttgaggaaggtgctaagacggctcctggaaagaaacgtccggtagagcagtcgccacaagagccagactcctcctcgggcattggcaagacaggccagcagcccgctaaaaagagactcaattttggtcagactggcgactcagagtcagtccccgacccacaacctctcggagaacctccagcaacccccgctgctgtgggacctactacaatggcttcaggcggtggcgcaccaatggcagacaataacgaaggcgccgacggagtgggtaatgcctcaggaaattggcattgcgattccacatggctgggcgacagagtcatcaccaccagcacccgaacatgggccttgcccacctataacaaccacctctacaagcaaatctccaacgggacttcgggaggaagcaccaacgacaacacctacttcggctacagcaccccctgggggtattttgactttaacagattccactgccacttctcaccacgtgactggcagcgactcatcaacaacaactggggattccggcccaagagactcaacttcaaactcttcaacatccaagtcaaggaggtcacgcagaatgaaggcaccaagaccatcgccaataacctcaccagcaccatccaggtgtttacggactcggagtaccagctgccgtacgttctcggctccgcccaccagggctgcctgcctccgttcccggcggacgtgttcatgattccccagtacggctacctaacactcaacaacggtagtcaggccgtgggacgctcctccttctactgcctggaatactttccttcgcagatgctgagaacgggcaacaactttaccttcagctacacctttgaggacgttcctttccacagcagctacgctcacagccagagtctggaccgtctcatgaatcctctgattgaccagtacctgtactacttgtctcggactcaaacaacaggaggcacggcaaatacgcagactctgggcttcagccaaggtgggcctaatacaatggccaatcaggcaaagaactggctgccaggaccctgttaccgccaacaacgcgtctcaacgacaaccgggcaaaacaacaatagcaactttgcctggactgctgggaccaaataccatctgaatggaagaaattcattggctaatcctggcatcgctatggcaacacacaaagacgacaaggagcgtttttttcccagtaacgggatcctgatttttggcaaacaaaatgctgccagagacaatgcggattacagcgatgtcatgctcaccagcgaggaagaaatcaaaaccactaaccctgtggctacagaggaatacggtatcgtggcagataacttgcagcagcaaaacacggctcctcaaattggaactgtcaacagccagggggccttacccggtatggtctggcagaaccgggacgtgtacctgcagggtcccatctgggccaagattcctcacacggacggcaacttccacccgtctccgctgatgggcggctttggcctgaaacatcctccgcctcagatcctgatcaagaacacgcctgtacctgcggatcctccgaccaccttcaaccagtcaaagctgaactctttcatcacgcaatacagcaccggacaggtcagcgtggaaattgaatgggagctgcagaaggaaaacagcaagcgctggaaccccgagatccagtacacctccaactactacaaatctacaagtgtggactttgctgttaatacagaaggcgtgtactctgatccccaccccattggcacccgttacctcacccgtcccctgtaa

SEQ ID NO: 1633 - DNA, 2214 bp, Artificial Sequence
  Description of Artificial Sequence: Synthetic polynucleotide
atggctgccgatggttatcttccagattggctcgaggacaacctctctgagggcattcgcgagtggtgggcgctgaaacctggagccccgaagcccaaagccaaccagcaaaagcaggacgacggccggggtctggtgcttcctggctacaagtacctcggacccttcaacggactcgacaaaggagagccggtcaacgaggcggacgcggcagccctcgaacacgacaaggcctacgaccagcagctcaaagcgggtgacaatccgtacctgcggtataaccacgccgacgccgagtttcaggagcgtctgcaagaagatacgtcttttgggggcaacctcgggcgagcagtcttccaggccaagaagcgggttctcgaacctctcggtctggttgaggaaggcgctaagacggctcctggaaagaagagaccggtagagccatcaccccagcgttctccagactcctctacgggcatcggcaagaaaggccagcagcccgccagaaaaagactcaattttggtcagactggcgactcagagtcagttccagaccctcaacctctcggagaacctccagcagcgccctctggtgtgggacctaatacaatggcttcaggcggtggcgcaccaatggcagacaataacgagggcgccgacggagtgggtaattcctcgggaaattggcattgcgattccacatggatgggcgacagagtcatcaccaccagcacccgaacctgggccctgcccacctacaacaaccacctctacaagcaaatctccagtgcttcaacgggggccagcaacgacaaccactacttcggctacagcaccccctgggggtattttgactttaacagattccactgccacttttcaccacgtgactggcagcgactcatcaacaacaactggggattccggcccaagagactcaacttcaagctcttcaacatccaagtcaaggaggtcacgcagaatgaaggcaccaagaccatcgccaataacctcaccagcaccatccaggtgtttacggactcggagtaccagctgccgtacgttctcggctctgcccaccagggctgcctgcctccgttcccggcggacgtgttcatgattccccagtacggctacctaacactcaacaacggtagtcaggccgtgggacgctcctccttctactgcctggaatactttccttcgcagatgctgagaaccggcaacaacttccagtttacttacaccttcgaggacgtgcctttccacagcagctacgcgcacagccagagcttggaccggctgatgaatcctctgattgaccagtacctgtactacttgtctcggactcaaacaacaggaggcacggcaaatacgcagactctgggcttcagccaaggtgggcctaatacaatggccaatcaggcaaagaactggctgccaggaccctgttaccgccaacaacgcgtctcaacgacaaccgggcaaaacaacaatagcaactttgcctggactgctgggaccaaataccatctgaatggaagaaattcattggctaatcctggcatcgctatggcaacacacaaagacgacaaggagcgtttttttcccagtaacgggatcctgatttttggcaaacaaaatgctgccagagacaatgcggattacagcgatgtcatgctcaccagcgaggaagaaatcaaaaccactaaccctgtggctacagaggaatacggtatcgtggcagataacttgcagcagcaaaacacggctcctcaaattggaactgtcaacagccagggggccttacccggtatggtctggcagaaccgggacgtgtacctgcagggtcccatctgggccaagattcctcacacggacggcaacttccacccgtctccgctgatgggcggctttggcctgaaacatcctccgcctcagatcctgatcaagaacacgcctgtacctgcggatcctccgaccaccttcaaccagtcaaagctgaactctttcatcacacaatacagcaccggacaggtcagcgtggaaattgaatgggagctgcagaaggaaaacagcaagcgctggaaccccgagatccagtacacctccaactactacaaatctacaagtgtggactttgctgttaatacagaaggcgtgtactctgaaccccaccccattggcacccgttacctcacccgtcccctgtaa

SEQ ID NO: 1634 - DNA, 2211 bp, Artificial Sequence
  Description of Artificial Sequence: Synthetic polynucleotide
  misc_feature (676)..(676): n is a, c, g, or t
atggctgccgatggttatcttccagattggctcgaggacactctctctgaaggaataagacagtggtggaagctcaaacctggcccaccaccaccaaagcccgcagagcggcataaggacgacagcaggggtcttgtgcttcctgggtacaagtacctcggacccttcaacggactcgacaagggagagccggtcaacgaggcagacgccgcggccctcgagcacgacaaagcctacgaccggcagctcgacagcggagacaacccgtacctcaagtacaaccacgccgacgcggagtttcaggagcgccttaaagaagatacgtcttttgggggcaacctcggacgagcagtcttccaggcgaaaaagagggttcttgaacctctgggcctggttgaggaacctgttaagacggctccgggaaaaaagaggccggtagagcagtcgccacaagagccagactcctcctcgggcatcggcaagaaaggccagcagcccgctaaaaagagactcaattttggtcagactggcgactcagagtcagtccccgacccacaacctctcggagaacctccagcaacccccgctgctgtgggacctactacaatggcttcaggcggtggcgcaccaatggcggacaataacgaaggcgccgatggagtgggtaatgcctcangaaattggcattgcgattccacatggctgggcgacagagtcatcaccaccagcacccgaacatgggccttgccacctataacaaccacctctacaagcaaatctccagtgcttcaacgggggcgcagcaacgacaaccactacttcggctacagcaccccctgggggtattttgacttcaacagattccactgccacttctcaccacgtgactggcagcgactcatcaacaacaactggggattccggcctaagcgactcaacttcaagctcttcaacattcaggtcaaagaggttacggacaacaatggagtcaagaccatcgccaataaccttaccagcacggtccaggtcttcacggactcagactatcagctcccgtacgttctcggctctgcccaccagggctgcctgcctccgttcccggcggacgtgttcatgattccccagtacggctacctaacactcaacaacggtagtcaggccgtgggacgctcctccttctactgcctggaatactttccttcgcagatgctgagaaccggcaacaacttccagtttacttacaccttcgaggacgtgcctttccacagcagctacgcccacagccagagcttggaccggctgatgaatcctctgattgaccagtacctgtactacttgtctcggactcaaacaacaggaggcacggcaaatacgcagactctgggcttcagccaaggtgggcctaatacaatggccaatcaggcaaagaactggctgccaggaccctgttaccgccaacaacgcgtctcaacgacaaccgggcaaaacaacaatagcaactttgcctggactgctgggaccaaataccatctgaatggaagaaattcattggctaatcctggcatcgctatggcaacacacaaagacgacaaggagcgtttttttcccagtaacgggatcctgatttttggcaaacaaaatgctgccagagacaatgcggattacagcgatgtcatgctcaccagcgaggaagaaatcaaaaccactaaccctgtggctacagaggaatacggtatcgtggcagataacttgcagcagcaaaacacggctcctcaaattggaactgtcaacagccagggggccttacccggtatggtttggcagaaccgggacgtgtacctgcagggtcccatctgggccaagattcctcacacggacggcaacttccacccgtctccgctgatgggcggctttggcctgaaacatcctccgcctcagatcctgatcaagaacacgcctgtacctgcggatcctccgaccaccttcaaccagtcaaagctgaactctttcatcacacagtactccacgggacaggtcagcgtggaaattgaatgggagctgcagaaggaaaacagcaagcgctggaacccggagatccagtacacttccaactactacaaatctacaaatgtggactttgctgttaacacagaaggcgtgtactctgaaccccaccccattggcacccgttacctcacccgtcccctgtaa

SEQ ID NO: 1635 - DNA, 2211 bp, Artificial Sequence
  Description of Artificial Sequence: Synthetic polynucleotide
  misc_feature (715)..(715): n is a, c, g, or t
atggctgccgatggttatcttccagattggctcgaggacaacctctctgagggcattcgcgagtggtgggacttgaaacctggagccccgaaacccaaagccaaccagcaaaagcaggacgacggccggggtctggtgcttcctggctacaagtacctcggacccttcaacggactcgacaagggggagcccgtcaacgcggcggatgcagcggccctcgagcacgacaaggcctacgaccagcagctccaagcgggtgacaatccgtacctgcggtataaccacgccgacgccgagtttcaggagcgtcttcaaggagatacgtcttttgggggcaacctcggacgagcagtcttccaggccaagaagcgggttctcgaacctctcggtctggttgaggaagcggctaagacggctcctggaaagaagaggcctgtagagcagtctcctcaggaaccggactcctccgcgggtattggcaaatcgggtgcacagcccgctaaaaagagactcaatttcggtcagactggcgacacagagtcagtcccagaccctcaaccaatcggagaacctcccgcagccccctctggtgtgggacctaatacaatggctgcaggcggtggcgcaccaatggcagacaataacgaaggcgccgatggagtgggtagttcctcgggaaattggcattgcgattccacatggctgggcgacagantcatcaccaccagcacccgaacctgggccctgcccacctataacaaccatctctacaagcaaatctccagtgcttcaacgggggccagcaacgacaaccactacttcggctacagcaccccctgggggtattttgacttcaacagattccactgccacttctcaccacgtgactggcagcgactcatcaacaacaactggggattccggcctaagcgactcaacttcaagctcttcaacattcaggtcaaagaggttacggacaacaatggagtcaagaccatcgccaataaccttaccagcacggtccaggtcttcacggactcggagtaccagttgccgtacgtcctcggctctgcgcaccagggctgcctgcctccgttcccggcggacgtgttcatgattccgcagtacggctacctaacgctcaacaatggcagccaggcagtgggacggtcatccttttactgcctggaatatttcccatcgcagatgctgagaacgggcaacaactttaccttcagctacacttttgaggacgttcctttccacagcagctacgctcacagccagagtctggaccgtctcatgaatcctctgattgaccagtacctgtactacttgtctcggactcaaacaacaggaggcacggcaaatacgcagactctgggcttcagccaaggtgggcctaatacaatggccaatcaggcaaagaactggctgccaggaccctgttaccgccaacaacgcgtctcaacgacaaccggacaaaacaacaatagcaactttgcctggactgctgggaccaaataccatctgaatggaagaaattcattggctaatcctggcatcgctatggcaacacacaaagacgacaaggagcgtttttttcccagtaacgggatcctgatttttggcaaacaaaatgctgccagagacaatgcggattacagcgatgtcatgctcaccagcgaggaagaaatcaaaaccactaaccctgtggctacagaggaatacggtatcgtggcagataactttcagcagcaaaacacggctcctcaaattggaactgtcaacagccagggggccttacccggtatggtctggcagaaccgggacgtgtacctgcagggtcccatctgggccaagattcctcacacggacggcaacttccacccgtctccgctgatgggcggctttggcctgaaacatcctccgcctcagatcctgatcaagaacacgcctgtacctgcggatcctccgaccaccttcaaccagtcaaagctgaactctttcatcacgcaatacagcaccggacaggtcagcgtggaaattgaatgggagctgcagaaggaaaacagcaagcgctggaaccccgagatccagtacacctccaactactacaaatctacaagtgtggactttgctgttaatacagaaggcgtgtactctgaaccccaccccattggcacccgttacctcacccgtcccctgtaa

SEQ ID NO: 1636 - DNA, 2211 bp, Artificial Sequence
  Description of Artificial Sequence: Synthetic polynucleotide
atggctgccgatggttatcttccagattggctcgaggacaacctctctgagggcattcgcgagtggtgggcgctgaaacctggagccccgaagcccaaagccaaccagcaaaagcaggacgacggccggggtctggtgcttcctggctacaagtacctcggacccttcaacggactcgacaaaggagagccggtcaacgaggcggacgcggcagccctcgaacacgacaaagcttacgaccagcagctcaaggccggtgacaacccctacctcaagtataaccacgccgacgccgagtttcaggagcgtctgcaagaagatacgtcttttgggggcaacctcgggcgagcagtcttccaggccaaaaagaggcttcttgaacctcttggtctggttgaggaagcggctaagacggctcctggaaagaagaggcctgtagagcagtctcctcaggaaccggactcctccgcgggtattggcaaatcgggtgcacagcccgctaaaaagagactcaatttcggtcagactggcgacacagagtcagtcccagacccacaacctctcggagaacctccagcaacccccgctgctgtgggacctactacaatggcttcaggcggtggcgcaccaatggcggacaataacgaaggcgccgatggagtgggtaatgcctcaggaaattggcattgcgattccacatggctgggcgacagagtcatcaccaccagcacccgaacatgggccttgcccacctataacaaccacctctacaagcaaatctccagtgcttcaacgggggccagcaacgacaaccactacttcggctacagcaccccctgggggtattttgacttcaacagattccactgccacttctcaccacgtgactggcagcgactcatcaacaacaactggggattccggcccaagagactcagcttcaagctcttcaacatccaggtcaaggaggtcacgcagaatgaaggcaccaagaccatcgccaataacctcaccagcaccatccaggtgtttacggactcggagtaccagctgccgtacgttctcggctccgcccaccagggctgcctgcctccgttcccggcggacgtgttcatgattccccagtacggctacctaacactcaacaacggtagtcaggccgtgggacgctcctccttctactgcctggaatactttccttcgcagatgctgagaaccggcaacaacttccagtttacttacaccttcgaggacgtgcctttccacagcagctacgcccacagccagagcttggaccggctgatgaatcctctgattgaccagtacctgtactacttgtctcggactcaaacaacaggaggcacggcaaatacgcagactctgggcttcagccaaggtgggcctaatacaatggccaatcaggcaaagaactggctgccaggaccctgttaccgccaacaacgcgtctcaacgacaaccgggcaaaacaacaatagcaactttgcctggactgctgggaccaaataccatctgaatggaagaaattcattggctaatcctggcatcgctatggcaacacacaaagacgacaaggagcgtttttttcccagtaacgggatcctgatttttggcaaacaaaatgctgccagagacaatgcggattacagcgatgtcatgctcaccagcgaggaagaaatcaaaaccactaaccctgtggctacagaggaatacggtatcgtggcagataacttgcagcagcaaaacacggctcctcaaattggaactgtcaacagccagggggccttacccggtatggtctggcagaaccgggacgtgtacctgcagggtcccatctgggccaagattcctcacacggacggcaacttccacccgtctccgctgatgggcggctttggcctgaaacatcctccgcctcagatcctgatcaagaacacgcctgtacctgcggatcctccgaccaccttcaaccagtcaaagctgaactctttcatcacgcaatacagcaccggacaggtcagcgtggaaattgaatgggagctgcagaaggaaaacagcaagcgctggaaccccgagatccagtacacctccaactactacaaatctacaagtgtggactttgctgttaatacagaaggcgtgtactctgaaccccaccccattggcacccgttacctcacccgtcccctgtaa

SEQ ID NO: 1637 - DNA, 2211 bp, Artificial Sequence
  Description of Artificial Sequence: Synthetic polynucleotide
atggctgccgatggttatcttccagattggctcgaggacactctctctgaaggaataagacagtggtggaagctcaaacctggcccaccaccaccaaagcccgcagagcggcataaggacgacagcaggggtcttgtgcttcctgggtacaagtacctcggacccttcaacggactcgacaagggagagccggtcaacgaggcagacgccgcggccctcgagcacgacaaagcctacgaccagcagctccaagcgggtgacaatccgtacctgcggtataaccacgccgacgccgagtttcaggagcgtcttcaaggagatacgtcttttgggggcaacctcggacgagcagtcttccaggccaaaaagaggcttcttgaacctcttggtctggttgaggaagcggctaagacggctcctggaaagaagaggcctgtagagcagtctcctcaggaaccggactcctccgcgggtattggcaaatcgggtgcacagcccgctaaaaagagactcaatttcggtcagactggcgacacagagtcagtcccagaccctcaaccaatcggagaacctcccgcagccccctcaggtgtgggatctcttacaatggcttcaggtggtggcgcaccagtggcagacaataacgaaggtgccgatggagtgggtagttcctcgggaaattggcattgcgattcccaatggctgggggacagagtcatcaccaccagcacccgaacatgggccttgcccacctataacaaccacctctacaagcaaatctccagtgcttcaacgggggccagcaacgacaaccactacttcggctacagcaccccctgggggtattttgacttcaaccgcttccactgccacttctcaccacgtgactggcagcgactcatcaacaacaactggggattccggcccaagagactcagcttcaagctcttcaacatccaggtcaaggaggtcacgcagaatgaaggcaccaagaccatcgccaataacctcaccagcaccatccaggtgtttacggactcggagtaccagctgccgtacgttctcggctctgcccaccagggctgcctgcctccgttcccggcggacgtgttcatgattccccagtacggctacctaacactcaacaacggtagtcaggccgtgggacgctcctccttctactgcctggaatactttccttcgcagatgctgagaaccggcaacaacttccagtttacttacaccttcgaggacgtgcctttccacagcagctacgcccacagccagagcttggaccggctgatgaatcctctgattgaccagtacctgtactacttgtctcggactcaaacaacaggaggcacggcaaatacgcagactctgggcttcagccaaggtgggcctaatacaatggccaatcaggcaaagaactggctgccaggaccctgttaccgccaacaacgcgtctcaacgacaaccgggcaaaacaacaatagcaactttgcctggactgctgggaccaaataccatctgaatggaagaaattcattggctaatcctggcatcgctatggcaacacacaaagacgacaaggagcgtttttttcccagtaacgggatcctgatttttggcaaacaaaatgctgccagagacaatgcggattacagcgatgtcatgctcaccagcgaggaagaaatcaaaaccactaaccctgtggctacagaggaatacggtatcgtggcagataacttgcagcagcaaaacacggctcctcaaattggaactgtcaacagccagggggccttacccggtatggtctggcagaaccgggacgtgtacctgcagggtcccatctgggccaagattcctcacacggacggcaacttccacccgtctccgctgatgggcggctttggcctgaaacatcctccgcctcagatcctgatcaagaacacgcctgtacctgcggatcctccgaccaccttcaaccagtcaaagctgaactctttcatcacgcaatacagcaccggacaggtcagcgtggaaattgaatgggagctgcagaaggaaaacagcaagcgctggaaccccgagatccagtacacctccaactactacaaatctacaagtgtggactttgctgttaatacagaaggcgtgtactctgaaccccaccccattggcacccgttacctcacccgtcccctgtaa

SEQ ID NO: 1638 - DNA, 2217 bp, Artificial Sequence
  Description of Artificial Sequence: Synthetic polynucleotide
atggctgccgatggttatcttccagattggctcgaggacaacctctctgagggaataagacagtggtggaagctcaaacctggcccaccaccaccaaagcccgcagagcggcataaggacgacagcaggggtcttgtgcttcctgggtacaagtacctcggacccttcaacggactcgacaagggagagccggtcaacgcggcggacgcagcggccctcgagcacgacaaggcctacgaccagcagctcaaagcgggtgacaatccgtacctgcggtataaccacgccgacgccgagtttcaggagcgtctgcaagaagatacgtcttttgggggcaacctcgggcgagcagtcttccaggccaagaagcgggttctcgaacctctcggtctggttgaggaaggcgctaagacggctcctggaaagaagagaccggtagagccatcaccccagcgttctccagactcctctacgggcatcggcaagaaaggccagcagcccgctaaaaagagactcaattttggtcagactggcgactcagagtcagtccccgacccacaacctctcggagaacctccagcaacccccgctgctgtgggacctactacaatggcttcaggcggtggcgcaccaatggcagacaataacgaaggcgccgacggagtgggtaatgcctcaggaaattggcattgcgattccacatggctgggggacagagtcatcaccaccagcacccgaacctgggccctgcccacctacaacaaccacctctacaagcaaatctccaacgggacttcgggaggaagcaccaacgacaacacctacttcggctgcgtcacgccctgggggtattttgactttaacaaattccactgccacttttcaccggatgactggcaacgactcatcaacaacggctggggattccggactaagcgactcaacttcaagctcttcagcatgaaagtcaaaaagggtacggacaacactggaatcaagaccatcgcgaataaccttaccaacacggtccatgtcttcgcggactcggagtaccagttgccgtacgtcctcggctctgcgcaccagggctgcctccctccgttcccggcggacgtgttcatgattccgcagtacggctacctaacgctcaacaatggcagccaggcagtgggacggtcatccttttactgcctggaatatttcccatcgcagatgctgagaacgggcaacaactttaccttcagctacacctttgaggacgttcctttccacagcagctacgctcacagccagagtctggaccgtctcatgaatcctctgattgaccagtacctgtactacttgtctcggactcaaacaacaggaggcacggcaaatacgcagactctgggcttcagccaaggtgggcctaatacaatggccaatcaggcaaagaactggctgccaggaccctgttaccgccaacaacgcgtctcaacgacaaccgggcaaaacaacaatagcaactttgcctggactgctgggaccaaataccatctgaatggaagaaattcattggctaatcctggcatcgctatggcaacacacaaagacgacaaggagcgtttttttcccagtaacgggatcctgatttttggcaaacaaaatgctgccagagacaatgcggattacagcgatgtcatgctcaccagcgaggaagaaatcaaaaccactaaccctgtggctacagaggaatacggtatcgtggcagataacttgcagcagcaaaacacggctcctcaaattggaactgtcaacagccagggggccttacccggtatggtctggcagaaccgggacgtgtacctgcagggtcccatctgggccaagattcctcacacggacggcaacttccacccgtctccgctgatgggcggctttggcctgaaacatcctccgcctcagatcctgatcaagaacacgcctgtacctgcggatcctccgaccaccttcaaccagtcaaagctgaactctttcatcacgcaatacagcaccggacaggtcagcgtggagatcgagtgggagctgcagaaggaaaacagcaagcgctggaacccggagatccagtacacctccaactactacaaatctacaagtgtggactttgctgttaatacagaaggcgtgtactctgaaccccaccccattggcacccgttacctcacccgtcccctgtaa

SEQ ID NO: 1639 - DNA, 2214 bp, Artificial Sequence
  Description of Artificial Sequence: Synthetic polynucleotide
atggctgccgatggttatcttccagattggctcgaggacactctctctgaaggaataagacagtggtggaagctcaaacctggcccaccaccaccaaagcccgcagagcggcataaggacgacagcaggggtcttgtgcttcctgggtacaagtacctcggacccttcaacggactcgacaagggggagcccgtcaacgcggcggacgcagcggccctcgagcacgacaaggcctacgaccagcagctcaaagcgggtgacaatccgtacctgcggtataaccacgccgacgccgagtttcaggagcgtctgcaagaagatacgtcttttgggggcaacctcgggcgagcagtcttccaggccaagaagcgggttctcgaacctctcggtctggttgaggaaggcgctaagacggctcctggaaagaagagaccggtagagccatcaccccagcgttctccagactcctctacgggcatcggcaagaaaggccagcagcccgcgaaaaagagactcaactttgggcagactggcgactcagagtcagtgcccgaccctcaaccaatcggagaaccccccgcaggcccctctggtctgggatctggtacaatggctgcaggcggtggcgctccaatggcagacaataacgaaggcgccgatggagtgggtagttcctcgggaaattggcattgcgattccacatggctgggggacagagtcatcaccaccagcacccgaacctgggccctgcccacctacaacaaccacctctacaaacaaatttccagcgcttcaacgggagcctcgaacgacaatcactactttggctacagcaccccctgggggtattttgacttcaacagattccactgccacttctcaccacgtgactggcagcgactcatcaacaacaactggggattccggcctaagcgactcaacttcaagctcttcaacattcaggtcaaagaggttacggacaacaatggagtcaagaccatcgccaataaccttaccagcacggtccaggtcttcacggactcggagtaccagttgccgtacgtcctcggctctgcgcaccagggctgcctccctccgttcccggcggacgtgttcatgattccgcagtacggctacctaacgctcaacaatggcagccaggcagtgggacggtcatccttttactgcctggaatatttcccatcgcagatgctgagaacgggcaacaactttaccttcagctacacctttgaggacgttcctttccacagcagctacgctcacagccagagtctggaccgtctcatgaatcctctgattgaccagtacctgtactacttgtctcggactcaaacaacaggaggcacggcaaatacgcagactctgggcttcagccaaggtgggcctaatacaatggccaatcaggcaaagaactggctgccaggaccctgttaccgccaacaacgcgtctcaacgacaaccgggcaaaacaacaatagcaactttgcctggactgctgggaccaaataccatctgaatggaagaaattcattggctaatcctggcatcgctatggcaacacacaaagacgacaaggagcgtttttttcccagtaacgggatcctgatttttggcaaacaaaatgctgccagagacaatgcggattacagcgatgtcatgctcaccagcgaggaagaaatcaaaaccactaaccctgtggctacagaggaatacggtatcgtggcagataacctgcagcagcaaaacacggctcctcaaattggaactgtcaacagccagggggccttacccggtatggtctggcagaaccgggacgtgtacctgcagggtcccatctgggccaagattcttcacacggacggcaactttcacccttctccgctgatgggagggtttggaatgaagcacccgcctcctccgatcctgatcaagaacacgcctgtacctgcggatcctccgaccaccttcaaccagtcaaagctgaactctttcatcacgcaatacagcaccggacaggtcagcgtggaaattgaatgggagctgccgaaggaaaacagcaagcgctggaaccccgagatccagtacacctccaactactacaaatctacaagtgtggactttgctgttaatacagaaggtgtgtactatgaaccccaccccattggcacccgttacctcacccctcccctgtaa

SEQ ID NO: 1640 - DNA, 2214 bp, Artificial Sequence
  Description of Artificial Sequence: Synthetic polynucleotide
atggctgccgatggttatcttccagattggctcgaggacaacctctctgagggcattcgcgagtggtgggcgctgaaacctggagccccgaagcccaaagccaaccagcaaaagcaggacgacggccggggtctggtgcttcctggctacaagtacctcggacccttcaacggactcgacaagggggagcccgtcaacgcggcggacgcagcggccctcgagcacgacaaggcctacgaccagcagctcaaagcgggtgacaatccgtacctgcggtataaccacgccgacgccgagtttcaggagcgtctgcaagaagatacgtcttttgggggcaacctcgggcgagcagtcttccaggccaagaagcgggttctcgaacctctcggtctggttgaggaaggcgctaagacggctcctggaaagaagagaccggtagagccatcaccccagcgctctccagactcctctacgggcatcggcaagaaaggccaacagcccgccagaaaaagactcaattttggtcagactggcgactcagagtcagttccagaccctcaacctctcggagaacctccagcagcgccctctggtgtggcacctaatacaatggctgcaggcggtggcgcaccaatggcagacaataacgaaggcgccgacggagtgggtaatgcctcaggaaattggcattgcgattccacatggctgggcgacagagtcatcaccaccagcacccgaacatgggccttgcccacctataacaaccacctctacaagcaaatctccagtgcttcaacgggggccagcaacgacaaccactacttcggctacagcaccccctgggggtattttgatttcaacagattccactgccacttttcaccacgtgactggcagcgactcatcacaacaattgggggattccggcctaagcgactcaacttcaagctcttcaacattcaggtcaaagaggttacggacaacaatggagtcaagaccatcgccaataaccttaccagcacggtccaggtcttcacggactcggagtaccagttgccgtacgtcctcggctctgcgcaccagggctgcctccctccgttcccggcggacgtgttcatgattccgcagtacggctacctaacgctcaacaatggcagccaggcagtgggacggtcatccttttactgcctggaatatttcccatcgcagatgctgagaacgggcaacaactttaccttcagctacacctttgaggacgttcctttccacagcagctacgctcacagccagagtctggaccggctgatgaatcctctgattgaccagtacctgtactacttgtctcggactcaaacaacaggaggcacggcaaatacgcagactctgggcttcagccaaggtgggcctaatacaatggccaatcaggcaaagaactggctgccaggaccctgttaccgccaacaacgcgtctcaacgacaaccgggcaaaacaacaatagcaactttgcctggactgctgggaccaaataccatctgaatggaagaaattcattggctaatcctggcatcgctatggcaacacacaaagacgacaaggagcgtttttttcccagtaacgggatcctgatttttggcaaacaaaatgctgccagagacaatgcggattacagcgatgtcatgctcaccagcgaggaagaaatcaaaaccactaaccctgtggctacagaggaatacggtatcgtggcagataacttgcagcagcaaaacacggctcctcaaattggaactgtcaacagccagggggccttacccggtatggtctggcagaaccgggacgtgtacctgcagggtcccatctgggccaagattcctcacacggacggcaacttccacccgtctccgctgatgggcggctttggcctgaaacatcctccgcctcagatcctgatcaagaacacgcctgtacctgcggatcctccgaccaccttcaaccagtcaaagctgaactctttcatcacgcaatacagcaccggacaggtcagcgtggaaattgaatgggagctgcagaaggaaaacagcaagcgctggaaccccgagatccagtacacctccaactactacaaatctacaagtgtggactttgctgttaatacagaaggcgtgtactctgaaccccaccccattggcacccgttacctcacccgtcccctgtaa

SEQ ID NO: 1641 - DNA, 2211 bp, Artificial Sequence
  Description of Artificial Sequence: Synthetic polynucleotide
atggctgccgatggttatcttccagattggctcgaggacactctctctgaaggaataagacagtggtggaagctcaaacctggcccaccaccaccaaagcccgcagagcggcataaggacgacggccggggtctggtgcttcctggctacaagtacctcggacccttcaacggactcgacaagggggagcccgtcaacgcggcggacgcagcggccctcgagcacgacaaggcctacgaccagcagctcaaagcgggtgacaatccgtacctgcggtataaccacgccgacgccgagtttcaggagcgtctgcaagaagatacgtcttttgggggcaacctcggacgagcagtcttccaggcgaaaaagagggttcttgaacctctgggcctggttgaggaacctgttaagacggctccgggaaaaaagaggccggtagagcagtcgccacaagagccagactcctcctcgggcatcggcaagaaaggccagcagcccgctaaaaagagactcaattttggtcagactggcgactcagagtcagtccccgacccacaacctctcggagaacctccagcaacccccgctgctgtgggacctactacaatggcttcaggcggtggcgcaccaatggcagacaataacgaaggcgccgacggagtgggtaatgcctcaggaaattggcattgcgattccacatggatgggcgacagagtcatcaccaccagcacccgaacatgggccttgcccacctataacaaccacctctacaagcaaatctccagtgcttcaacgggggccagcaacgacaaccactacttcggctacagcaccccctgggggtattttgactttaacagattccactgccacttttcaccacgtgactggcagcgactcatcaacaacaactggggattccggcctaagcgactcaacttcaagctcttcaacattcaggtcaaggaggtcacgcagaatgaaggcaccaagaccatcgccaataacctcaccagcaccatccaggtgtttacggactcggagtaccagctgccgtacgttctcggctccgcccaccagggctgcctgcctccgttcccggcggacgtgttcatgatcccccagtacggctacctaacactcaacaacggtagtcaggccgtgggacgctcctccttctactgcctggaatactttccttcgcagatgctgagaaccggcaacaacttccagtttacttacaccttcgaggacgtgcctttccacagcagctacgcgcacagccagagcttggaccggctgatgaatcctctgattgaccagtacctgtactacttgtctcggactcaaacaacaggaggcacggcaaatacgcagactctgggcttcagccaaggtgggcctaatacaatggccaatcacgcaaagaactggctgccaggaccctgttaccgccaacaacgcgtctcaacgacaaccgggcaaaacaacaatagcaactttgcctggactgctgggaccaaataccatctgaatggaagaaattcattggctaatcctggcatcgctatggcaacacacaaagacgacaaggagcgtttttttcccagtaacgggatcctgatttttggcaaacaaaatgctgccagagacaatgcggattacagcgatgtcatgctcaccagcgaggaagaaatcaaaaccactaaccctgtggctacagaggaatacggtatcgtggcagataacttgcagcagcaaaacacggctcctcaaattggaactgtcaacagccagggggccttacccggtatggtctggcagaaccgggacgtgtacctgcagggtcccatctgggccaagattcctcacacggacggcaacttccacccgtctccgctgatgggcggcttcggcctgaaacatcctccgcctcagatcctgatcaagaacacgcctgtacctgcggatcctccgaccaccttcaaccagtcaaagctgaactctttcatcacgcaatacagcaccggacaggtcagcgtggaaattgaatgggagctgcagaaggaaaacagcaagcgctggaaccccgagatccagtacacctccaactactacaaatctacaagtgtggactttgctgttaatacagaaggcgtgtactctgaaccccaccccattggcacccgttacctcacccgtcccctgtaa

SEQ ID NO: 1642 - DNA, 2214 bp, Artificial Sequence
  Description of Artificial Sequence: Synthetic polynucleotide
atggctgccgatggttatcttccagattggctcgaggacaacctctctcagggcattcgcgagtggtgggacttgaaacctggagccccgaaacccaaagccaaccagcaaaagcaggacgacggccggggtctggtgcttcctggctacaagtacctcggacccttcaacggactcgacaagggggagcccgtcaacgcggcggacgcagcggccctcgagcacgacaaggcctacgaccagcagctcaaagcgggtgacaatccgtacctgcggtataaccacgccgacgccgagtttcaggagcgtctgcaagaagatacgtcttttgggggcaacctcggacgagcagtcttccaggccaagaagcgggttctcgaacctctcggtctggttgaggaaggcgctaagacggctcctggaaagaagagaccggtagagccatcaccccagcgttctccagactcctctacgggcatcggcaagaaaggccaacagcccgccagaaaaagactcaattttggtcagactggcgactcagagtcagttccagaccctcaacctctcggagaacctccagcagcgcccgctgctgtgggacctactacaatggcttcaggcggtggcgcaccaatggcagacaataacgaaggcgccgacggagtgggtagttcctcgggaaattggcattgcgattcccaatggctgggggacagagtcatcaccaccagcacccgaacctgggccctgcccacctacaacaaccacctctacaagcaaatctccagtgcttcaacgggggccagcaacgacaaccactacttcggctacagcaccccctgggggtattttgacttcaacagattccactgccacttttcaccacgtgactggcaaagactcatcaacaacaactggggattccggcccaagagactcagcttcaagctcttcaacatccaggtcaaggaggtcacgcagaatgaaggcaccaagaccatcgccaataacctcaccagcaccatccaggtgtttacggactcggagtaccagctgccgtacgttctcggctctgcccaccagggctgcctgcctccgttcccggcggacgtgttcatgattccccagtacgggtacctgactctgaacaatggcagtcaggccgtgggccgttcctccttctactgcctggagtactttccttctcaaatgctgagaaccggcaacaacttccagtttacttacaccttcgaggacgtgcctttccacagcagctacgcccacagccagagcttggaccggctgatgaatcctctgattgaccagtacctgtactacttgtctcggactcaaacaacaggaggcacgacaaatgcgcagactctgggcttcagccaaggtgggcctaatacaatggccaatcaggcaaagaactggctgccaggaccctgttaccgccaacaacgcgtctcaacgacaaccgggcaaaacaacaatagcaactttgcctggactgctgggaccaaataccatctgaatggaagaaattcattggctaatcctggcatcgctatggcaacacacaaagacgacaaggagcgtttttttcccagtaacgggatcctgatttttggcaaacaaaatgctgccagagacaatgcggattacagcgatgtcatgctcaccagcgaggaagaaatcaaaaccactaaccctgtggctacagaggaatacggtatcgtggcagataacttgcagcagcaaaacacggctcctcaaattggaactgtcaacagccagggggccttacccggtatggtctggcagaaccgggacgtgtacctgcagggtcccatctgggccaagattcctcacacggacggcaacttccacccgtctccgctgatgggcggctttggcctgaaacatcctccgcctcagatcctgatcaagaacacgcctgtacctgcggatcctccgaccaccttcaaccagtcaaagctgaactctttcatcacacagtactccacgggacaggtcagcgtggaaattgaatgggagctgcagaaggaaaacagcaagcgctggaacccggagatccagtacacttccaactactacaaatctacaaatgtggactttgctgttaacacagaaggcgtgtactctgaaccccaccccattggcacccgttacctcacccgtcccctgtaa

SEQ ID NO: 1643 - DNA, 2211 bp, Artificial Sequence
  Description of Artificial Sequence: Synthetic polynucleotide
atggctgccgatggttatcttccagattggctcgaggacaacctctctgagggcattcgcgagtggtgggacttgaaacctggagccccgaaacccaaagccaaccagcaaaagcaggacgacggccggggtctggtgcttcctggctacaagtacctcggacccttcaacggactcgacaagggggagcccgtcaacgcggcggacgcagcggccctcgagcacgacaaggcctacgaccagcagctcaaagcgggtgacaatccgtacctgcggtataaccacgccgacgccgagtttcaggagcgtctgcaagaagatacgtcttttgggggcaacctcgggcgagcagtcttccaggccaagaagagggttctcgaaccttttggtctggttgaggaaggcgctaagacggctcctggaaagaaacgtccggtagagcagtcgccacaagagccagactcctcctcgggcatcggcaagacaggccagcagcccgctaaaaagagactcaatttcggtcagactggcgacacagagtcagtcccagaccctcaaccaatcggagaacctcccgcagccccctcaggtgtgggacctaatacaatggctgcaggcggtggcgcaccaatggcagacaataacgaaggcgccgacggagtgggtagttcctcgggaaattggcattgcgattccacatggatgggtgacagagtcatcaccaccagcacccgaacctgggccctgcccacctacaataaccacctctacaagcaaatctccagtgcttcaacgggggccagcaacgacaaccactacttcggctacagcaccccctgggggtattttgacttcaacagattccactgccacttctcaccacgtgactggcagcgactcatcaacaacaactggggattccggcctaagcgactcaacttcaagctcttcaacattcaggtcaaggaggtcacgcagaatgaaggcaccaagaccatcgccaataacctcaccagcaccatccaggtgtttacggactcggagtaccagctgccgtacgttctcggctctgcccaccagggctgcctgcctccgttcccggcggacgtgttcatgattccccagtacggctacctaacactcaacaacggtagtcaggccgtgggacgctcctccttctactgcctggaatactttccttcgcagatgctgagaaccggcaacaacttccagtttacttacaccttcgaggacgtgcctttccacagcagctacgcccacagccagagcttggaccggctgatgaatcctctgattgaccagtacctgtactacttgtctcggactcaaacaacaggaggcacggcaaatacgcagactctgggcttcagccaaggtgggcctaatacaatggccaatcaggcaaagaactggctgccaggaccctgttaccgccaacaacgcgtctcaacgacaaccgggcaaaacaacaatagcaactttgcctggactgctgggaccaaataccatctgaatggaagaaattcattggctaatcctggcatcgctatggcaacacacaaagacgacaaggagcgtttttttcccagtaacgggatcctgatttttggcaaacaaaatgctgccagagacaatgcggattacagcgatgtcatgctcaccagcgaggaagaaatcaaaaccactaaccctgtggctacagaggaatacggtatcgtggcagataacttgcagcagcaaaacacggctcctcaaattggaactgtcaacagccagggggccttacccggtatggtctggcagaaccgggacgtgtacctgcagggtcccatctgggccaagattcctcacacggacggcaacttccacccgtctccgctgatgggcggctttggcctgaaacatcctccgcctcagatcctgatcaagaacacgcctgtacctgcggatcctccgaccaccttcaaccagtcaaagctgaactctttcatcacacagtactccacgggacaggtcagcgtggaaattgaatgggagctgcagaaggaaaacagcaagcgctggaacccggagatccagtacacttccaactactacaaatctacaaatgtggactttgctgttaacacagaaggcgtgtactctgaaccccaccccattggcacccgttacttcacccgtcccctgtaa

SEQ ID NO: 1644 - DNA, 2211 bp, Artificial Sequence
  Description of Artificial Sequence: Synthetic polynucleotide
atggctgccgatggttatcttccagattggctcgaggacaacctctctgagggcattcgcgagtggtgggacttgaaacctggagccccgaaacccaaagccaaccagcaaaagcaggacgacggccggggtctggtgcttcctggctacaagtacctcggacccttcaacggactcgacaagggggagcccgtcaacgcggcggacgcagcggccctcgagcacgacaaggcctacgaccagcagctcaaagcgggtgacaatccgtacctgcggtataaccacgccgacgccgagtttcaggagcgtctgcaagaagatacgtcttttgggggcaacctcgggcgagcagtcttccaggccaagaagcgggttctcgaacctctcggtctggttgaggaaggcgctaagacggctcctggaaagaaacgtccggtagagcagtcgccacaagagccagactcctcctcgggcatcggcaagacaggccagcagcccgctaaaaaaagactcaattttggtcagactggcgactcagagtcagttccagaccctcaacctctcggagaacctccagcaacccccgctgctgtgggacctactacaatggcttcaggtggtggcgcaccaatggcagacaataacgagggcgccgacggagtgggtaattcctcgggaaattggcattgcgattccacatggatgggcgacagagtcatcaccaccagcacccgaacctgggccctgcccacctacaacaatcacctctacaagcaaatctccagtgcttcaacgggggccagcaacgacaaccactacttcggctacagcaccccctgggggtattttgacttcaacagattccactgccacttctcaccacgtgactggcagcgactcatcaacaacaactggggattccggcctaagcgactcaacttcaagctcttcaacattcaggtcaaagaggttacggacaacaatggagtcaagaccatcgccaataaccttaccagcacggtccaggtcttcacggactcggagtaccagttgccgtacgtcctcggctctgcgcaccagggctgcctccctccgttcccggcggacgtgttcatgattccgcagtacggctacctaacgctcaacaacggtagtcaggccgtgggacgctcctccttctactgcctggaatactttccttcgcagatgctgagaaccggcaacaacttccagtttacttacaccttcgaggacgtgcctttccacagcagctacgcccacagccagagcttggaccggctgatgaatcctctgattgaccagtacctgtactacttgtctcggactcaaacaacaggaggcacggcaaatacgcagactctgggcttcagccaaggtgggcctaatacaatggccaatcaggcaaagaactggctgccaggaccctgttaccgccaacaacgcgtctcgacgacaaccgggcaaaacaacaatagcaactttgcctggactgctgggaccaaataccatctgaatggaagaaattcattggctaatcctggcatcgctatggcaacacacaaagacgacaaggagcgtttttttcccagtaacgggatcctgatttttggcaaacaaaatgctgccagagacaatgcggattacagcgatgtcatgctcaccagcgaggaagaaatcaaaaccactaaccctgtggctacagaggaatacggtatcgtggcagataacttgcagcagcaaaacacggctcctcaaattggaactgtcaacagccagggggccttacccggtatggtttggcagaaccgggacgtgtacctgcagggtcccatctgggccaagattcctcacacggacggcaacttccacccgtctccgctgatgggcggctttggcctgaaacatcctccgcctcagatcctgatcaagaacacgcctgtacctgcggatcctccgaccaccttcaaccagtcaaagctgaactctttcatcacacagtactccacgggacaggtcagcgtggaaattgaatgggagctgcagaaggaaaacagcaagcgctggaacccggagatccagtacacttccaactactacaaatctacaaatgtggactttgctgttaacacagaaggcgtgtactctgaaccccaccccattggcacccgttacctcacccgtcccctgtaa

SEQ ID NO: 1645 - DNA, 2211 bp, Artificial Sequence
  Description of Artificial Sequence: Synthetic polynucleotide
atggctgccgatggttatcttccagattggctcgaggacaacctctctgagggcattcgcgagtggtgggacttgaaacctggagccccgaagcccaaagccaaccagcaaaagcaggacgacggccggggtctggtgcttcctggctacaagtacctcggacccttcaacggactcgacaagggggagcccgtcaacgcggcggacgcagcggccctcgagcacgacaaggcctacgaccagcagctcaaagcgggtgacaatccgtacctgcggtataaccacgccgacgccgagtttcaggagcgtctgcaagaagatacgtcttttgggggcaacctcgggcgagcagtcttccaggccaagaagcgggttctcgaacctctcggtctggttgaggaaggcgctaagacggctcctggaaagaaacgtccggtagagcagtcaccacaagagccagactcctcctcgggcatcggcaagacaggccagcagcccgctaaaaagagactcaattttggtcagactggcgactcagagtcagtccccgacccacaacctctcggagaacctccagcaacccccgctgctgtgggacctactacaatggcttcaggcggtggcgcaccaatggcggacaataacgaaggcgccgatggagtgggtaatgcctcaggaaattggcattgcgattccacatggctgggcgacagagtcatcaccaccagcacccgaacatgggccttgcccacctataacaaccacctctacaagcaaatctccagtgcttcaacgggggccagcaacgacaaccactacttcggctacagcaccccctgggggtattttgactttaacagattccactgccacttctcaccacgtgactggcagcgactcatcaacaacaactggggattccggcccaagagactcaacttcaagctcttcaacatccaggtcaaggaggtcacgcagaatgaaggcaccaagaccatcgccaataacctcaccagcaccatccaggtgtttacggactcggagtaccagctgccgtacgttctcggctctgcccaccagggctgcctgcctccgttcccggcggacgtgttcatgattccccagtacggctacctgactctgaacaatggcagtcaggccgtgggccgttcctccttctactgcctagagtactttccttctcaaatgctgagaacgggcaacaactttgagttcagctaccagtttgaggacgtgccttttcacagcagctacgcgcacagccaaagcctggaccggctgatgaatcctctgattgaccagtacctgtactacttgtctcggactcaaacaacaggaggcacggcaaatacgcagactctgggcttcagccaaggtgggcctaatacaatggccaatcaggcaaagaactggctgccaggaccctgttaccgccaacaacgcgtctcaacgacaaccgggcaaaacaacaatagcaactttgcctggactgctgggaccaaataccatatgaatggaagaaattcattggttaatcctggcatcgctatggcaacacacaaagacgacaaggagcgtttttttcccagtaacgggatcctgatttttggcaaacaaaatgttgccagagacaatgcggattacagcgatgtcatgctcaccagcgaggaagaaatcaaaaccactaaccctgtggctacagaggaatacggtattgtggcagataacttgcagcagcaaaacacggctcctcaaattggaactgtcaacagccagggggccttacccggtatggtctggcagaaccgggacgtgtacctgcagggtcccatctgggccaagattcctcacacggacggcaacttccacccgtcgccgctgatgggcggctttggcctgaaacatcctccgcctcagatcctgatcaagaacacgcctgtacctgcggatcctccgaccaccttcaaccagtcaaagctgaactctttcatcacgcaatacagcaccggacaggtcagcgtggaaattgaatgggagctgcagaaggaaaacagcaagcgctggaaccccgagatccagtacacctccaactactacaaatctacaagtgtggactttgctgttaatacagaaggcgtgtactctgaaccccaccccattggcacccgttacctcacccgtcccctgtaa

SEQ ID NO: 1646 - protein, 736 aa, Artificial Sequence
  Description of Artificial Sequence: Synthetic polypeptide
MAADGYLPDWLEDTLSEGIRQWWKLKPGPPPPKPAERHKDDSRGLVLPGYKYLGPFNGLDKGEPVNEADAAALEHDKAYDRQLDSGDNPYLKYNHADAEFQERLKEDTSFGGNLGRAVFQAKKRVLEPLGLVEEPVKTAPGKKRPVEQSPQEPDSSSGIGKKGQQPAKKRLNFGQTGDSESVPDPQPLGEPPATPAAVGPTTMASGGGAPMADNNEGADGVGNASGNWHCDSTWMGDRVITTSTRTWALPTYNNHLYKQISSASTGASNDNHYFGYSTPWGYFDFNRFHCHFSPRDWQRLINNNWGFRPKRLNFRLFNIQVKEVTDNNGVKTIANNLTSTVQVFTDSEYQLPYVLGSAHQGCLPPFPADVFMIPQYGYLTLNNGSQAVGRSSFYCLEYFPSQMLRTGNNFTFSYTFEEVPFHSSYAHSQSLDRLMNPLIDQYLYYLSRTQTTGGTANTQTLGFSQGGPNTMANQAKNWLPGPCYRQQRVSTTTGQNNNSNFAWTAGTKYHLNGRNSLANPGIAMATHKDDKERFFPSNGILIFGKQNAARDNADYSDVMLTSEEEIKTTNPVATEEYGIVADNLQQQNTAPQIGTVNSQGALPGMVWQNRDVYLQGPIWAKIPHTDGNFHPSPLMGGFGLKHPPPQILIKNTPVPADPPTTFNQSKLNSFITQYSTGQVSVEIEWELQKENSKRWNPEIQYTSNYYKSTSVDFAVNTEGVYSEPHPIGTRYLTRPL

SEQ ID NO: 1647 - protein, 736 aa, Artificial Sequence
  Description of Artificial Sequence: Synthetic polypeptide
MAADGYLPDWLEDNLSEGIREWWDLKPASPKPKANQQKQDDGRGLVLPGYKYLGPFNGLDKGEPVNAADAAALEHDKAYDQQLKAGDNPYLRYNHADAEFQERLQEDTSFGGNLGRAVFQAKKRLLEPLGLVEEAAKTAPGKKRPVEQSPQEPDSSAGIGKSGAQPAKKRLNFGQTGGTESVPDPQPLGEPPAAPSGVGPNTMAAGGGAPMADNNEGADGVGSSSGNWHCDSTWLGDRVITTSTRTWALPTYNNHLYKQISSASTGASNDNHYFGYSTPWGYFDFNRFHCHFSPRDWQRLINNNWGFRPKRLSFKLFNIQVKEVTQNEGTKTIANNLTSTIQVFTDSEYQLPYVLGSAHQGCLPPFPADVFMIPQYGYLTLNNGSQAVGRSSFYCLEYFPSQMLRTGNNFQFTYTFEDVPFHSSYAHSQSLDRLMNPLIDQYLYYLSRTQTTGGTANTQTLGFSQGGPNTMANQAKNWLPGPCYRQQRVSTTTGQNNNSNFAWTAGTKYHLNGRNSLANPGIAMATHKDDKERFFPSNGILIFGKQNAARDNADYSDVMLTSEEEIKTTNPVATEEYGIVADNLQQQNTAPQIGTVNSQGALPGMVWQNRDVYLQGPIWAKIPHTDGNFHPSPLMGGFGLKHPPPQILIKNTPVPADPPTTFNQSKLNSFITQYSTGQVSVEIEWELQKENSKRWNPEIQYTSNYYKSTSVDFAVNTEGVYSEPHPIGTRYLTRPL

SEQ ID NO: 1648 - protein, 736 aa, Artificial Sequence; identical to SEQ ID NO: 1587
  Description of Artificial Sequence: Synthetic polypeptide

SEQ ID NO: 1649 - protein, 736 aa, Artificial Sequence
  Description of Artificial Sequence: Synthetic polypeptide
MAADGYLPDWLEDNLSEGIREWWDLEPGAPKPKANQQKQDDGRGLVLPGYKYLGPFNGLDKGEPVNAADAAALEHDKAYDQQLKAGDNPYLRYNHADAEFQERLQEDTSFGGNLGRAVFQAKKRVLEPLGLVEEGAKTAPGKKRPVEQSPQEPDSSSGIGKTGQQPAKKRLNFGQTGDSESVPDPQPLGEPPATPAAVGPTTMASGGGAPMADNNEGADGVGNASGNWHCDSTWLGDRVITTSTRTWALPTYNNHLYKQISSASTGASNDNHYFGYSTPWGYFDFNRFHCHFSPRDWQRLINNNWGFRPKRLNFKLFNIQVKEVTDNNGVKTIANNLTSTVQVFTDSEYQLPYVLGSAHQGCLPPFPADVFMIPQYGYLTLNNGSQAVGRSSFYCLEYFPSQMLRTGNNFQFTYTFEDVPFHSSYAHSQSLDRLMNPLIDQYLYYLSRTQTTGGTANTQTLGFSQGGPNTMANQAKNWLPGPCYRQQRVSTTTGQNNNSNFAWTAGTKYHLNGRNSLANPGIAMATHKDDKERFFPSNGILIFGKQNAARDNADYSDVMLTSEEEIKTTNPVATEEYGIVADNLQQQNTAPQIGTVNSQGALPGMVWQNRDVYLQGPIWAKIPHTDGNFHPSPLMGGFGLKHPPPQILIKNTPVPADPPTTFNQSKLNSFITQYSTGQVSVEIEWELQKENSKRWNPEIQYTSNYYKSTSVDFAVNTEGVYSEPHPIGTRYLTRPL

SEQ ID NO: 1650 - protein, 736 aa, Artificial Sequence; identical to SEQ ID NO: 1587
  Description of Artificial Sequence: Synthetic polypeptide

SEQ ID NO: 1651 - protein, 736 aa, Artificial Sequence
  Description of Artificial Sequence: Synthetic polypeptide
MAADGYLPDWLEDTLSEGIRQWWKLKPGPPPPKPAERHKDDSRGLVLPGYKYLGPFNGLDKGEPVNEADAAALEHDKAYDRQLDSGDNPYLKYNHADAEFQERLKEDTSFGGNLGRAVFQAKKRVLEPLGLVEEPVKTAPGKKRPVEQSPQEPDSSSGIGKKGQQPAKKRLNFGQTGDSESVPDPQPLGEPPATPAAVGPTTMASGGGAPMADNNEGADGVGNASGNWHCDSTWLGDRVITTSTRTWALPTYNNHLYKQISSASTGASNDNHYFGYSTPWGYFDFNRFHCHFSPRDWQRLINNNWGFRPKRLNFKLFNIQVKEVTDNNGVKTIANNLTSTVQVFTDSDYQLPYVLGSAHQGCLPPFPADVFMIPQYGYLTLNNGSQAVGRSSFYCLEYFPSQMLRTGNNFQFTYTFEDVPFHSSYAHSQSLDRLMNPLIDQYLYYLSRTQTTGGTANTQTLGFSQGGPNTMANQAKNWLPGPCYRQQRVSTTTGQNNNSNFAWTAGTKYHLNGRNSLANPGIAMATHKDDKERFFPSNGILIFGKQNAARDNADYSDVMLTSEEEIKTTNPVATEEYGIVADNLQQQNTAPQIGTVNSQGALPGMVWQNRDVYLQGPIWAKIPHTDGNFHPSPLMGGFGLKHPPPQILIKNTPVPADPPTTFNQSKLNSFITQYSTGQVSVEIEWELQKENSKRWNPEIQYTSNYYKSTSVDFAVNTEGVYSEPHPIGTRYLTRPL

SEQ ID NO: 1652 - protein, 734 aa, Artificial Sequence
  Description of Artificial Sequence: Synthetic polypeptide
MAADGYLPDWLEDTLSEGIRQWWKLKPGPPPPKPAERHKDDSRGLVLPGYKYLGPFNGLDKGEPVNEADAAALEHDKAYDQQLQAGDNPYLRYNHADAEFQERLQGDTSFGGNLGRAVFQAKKRLLEPLGLVEEAAKTAPGKKRPVEQSPQEPDSSAGIGKSGAQPAKKRLNFGQTGDTESVPDPQPIGEPPAAPSGVGSLTMASGGGAPVADNNEGADGVGSSSGNWHCDSQWLGDRVITTSTRTWALPTYNNHLYKQISSASTGASNDNHYFGYSTPWGYFDFNRFHCHFSPRDWQRLINNNWGFRPKRLSFKLFNHPGQGGHAERHQDHRQPHQHIQVFTDSEYQLPYVLGSAHQGCLPPFPADVFMIPQYGYLTLNNGSQAVGRSSFYCLEYFPSQMLRTGNNFQFTYTFEDVPFHSSYAHSQSLDRLMNPLIDQYLYYLSRTQTTGGTANTQTLGFSQGGPNTMANQAKNWLPGPCYRQQRVSTTTGQNNNSNFAWTAGTKYHLNGRNSLGNPGIAMATHKDDKERFFPSNGILIFGKQNAARDNADYSDVMLTSEEEIKTTNPVATEEYGIVADNLQQQNTAPQIGTVNSQGALPGMVWQNRDVYLQGPIWAKIPHTDGNFHPSPLMGGFGLKHPPPQILIKNTPVPADPPTAFNQSKLNSFITQYSTGQVSVEIEWELQKENSKRWNPEIQYTSNYYKSTSVDFAVNTEGVYSEPHPIGTRYLTRPL

SEQ ID NO: 1653 - protein, 737 aa, Artificial Sequence
  Description of Artificial Sequence: Synthetic polypeptide
MAADGYLPDWLEDNLSEGIREWWDLKHGAPKPKANQQKQDDGRGLVLPGYKYLGPFNGLDKGEPVNAADAAALEHDKAYDQQLKAGDNPYLRYNHADAEFQERLQEDTSFGGNLGRAVFQAKKRVLEPFGLVEEGAKTAPGKKRPVEQSPQEPDSSSGIGKTGQQPAKKRLNFGQTGDSESVPDPQPLGEPPATPAAVGPTTMASGGGAPMADNNEGADGVGNASGNWHCDSTWLGDRVITTSTRTWALPTYNNHLYKQISNGTSGGSTNDNTYFGYSTPWGYFDFNRFHCHFSPRDWQRLINNNWGFRPKRLNFKLFNIQVKEVTQNEGTKTIANNLTSTIQVFTDSEYQLPYVLGSAHQGCLPPFPADVFMIPQYGYLTLNNGSQAVGRSSFYCLEYFPSQMLRTGNNFTFSYTFEDVPFHSSYAHSQSLDRLMNPLIDQYLYYLSRTQTTGGTANTQTLGFSQGGPNTMANQAKNWLPGPCYRQQRVSTTTGQNNNSNFAWTAGTKYHLNGRNSLANPGIAMATHKDDKERFFPSNGILIFGKQNAARDNADYSDVMLTSEEEIKTTNPVATEEYGIVADNLQQQNTAPQIGTVNSQGALPGMVWQNRDVYLQGPIWAKIPHTDGNFHPSPLMGGFGLKHPPPQILIKNTPVPADPPTTFNQSKLNSFITQYSTGQVSVEIEWELQKENSKRWNPEIQYTSNYYKSTSVDFAVNTEGVYSDPHPIGTRYLTRPL

SEQ ID NO: 1654 - protein, 737 aa, Artificial Sequence
  Description of Artificial Sequence: Synthetic polypeptide
MAADGYLPDWLEDNLSEGIREWWALKPGAPKPKANQQKQDDGRGLVLPGYKYLGPFNGLDKGEPVNEADAAALEHDKAYDQQLKAGDNPYLRYNHADAEFQERLQEDTSFGGNLGRAVFQAKKRVLEPLGLVEEGAKTAPGKKRPVEPSPQRSPDSSTGIGKKGQQPARKRLNFGQTGDSESVPDPQPLGEPPAAPSGVGPNTMASGGGAPMADNNEGADGVGNSSGNWHCDSTWMGDRVITTSTRTWALPTYNNHLYKQISSASTGASNDNHYFGYSTPWGYFDFNRFHCHFSPRDWQRLINNNWGFRPKRLNFKLFNIQVKEVTQNEGTKTIANNLTSTIQVFTDSEYQLPYVLGSAHQGCLPPFPADVFMIPQYGYLTLNNGSQAVGRSSFYCLEYFPSQMLRTGNNFQFTYTFEDVPFHSSYAHSQSLDRLMNPLIDQYLYYLSRTQTTGGTANTQTLGFSQGGPNTMANQAKNWLPGPCYRQQRVSTTTGQNNNSNFAWTAGTKYHLNGRNSLANPGIAMATHKDDKERFFPSNGILIFGKQNAARDNADYSDVMLTSEEEIKTTNPVATEEYGIVADNLQQQNTAPQIGTVNSQGALPGMVWQNRDVYLQGPIWAKIPHTDGNFHPSPLMGGFGLKHPPPQILIKNTPVPADPPTTFNQSKLNSFITQYSTGQVSVEIEWELQKENSKRWNPEIQYTSNYYKSTSVDFAVNTEGVYSEPHPIGTRYLTRPL

SEQ ID NO: 1655 - protein, 736 aa, Artificial Sequence
  Description of Artificial Sequence: Synthetic polypeptide
  misc_feature (226)..(226): Xaa can be any naturally occurring amino acid
MAADGYLPDWLEDTLSEGIRQWWKLKPGPPPPKPAERHKDDSRGLVLPGYKYLGPFNGLDKGEPVNEADAAALEHDKAYDRQLDSGDNPYLKYNHADAEFQERLKEDTSFGGNLGRAVFQAKKRVLEPLGLVEEPVKTAPGKKRPVEQSPQEPDSSSGIGKKGQQPAKKRLNFGQTGDSESVPDPQPLGEPPATPAAVGPTTMASGGGAPMADNNEGADGVGNASXNWHCDSTWLGDRVITTSTRTWALPPITTTSTSKSPVLQRGRSNDNHYFGYSTPWGYFDFNRFHCHFSPRDWQRLINNNWGFRPKRLNFKLFNIQVKEVTDNNGVKTIANNLTSTVQVFTDSDYQLPYVLGSAHQGCLPPFPADVFMIPQYGYLTLNNGSQAVGRSSFYCLEYFPSQMLRTGNNFQFTYTFEDVPFHSSYAHSQSLDRLMNPLIDQYLYYLSRTQTTGGTANTQTLGFSQGGPNTMANQAKNWLPGPCYRQQRVSTTTGQNNNSNFAWTAGTKYHLNGRNSLANPGIAMATHKDDKERFFPSNGILIFGKQNAARDNADYSDVMLTSEEEIKTTNPVATEEYGIVADNLQQQNTAPQIGTVNSQGALPGMVWQNRDVYLQGPIWAKIPHTDGNFHPSPLMGGFGLKHPPPQILIKNTPVPADPPTTFNQSKLNSFITQYSTGQVSVEIEWELQKENSKRWNPEIQYTSNYYKSTNVDFAVNTEGVYSEPHPIGTRYLTRPL

SEQ ID NO: 1656 - protein, 736 aa, Artificial Sequence
  Description of Artificial Sequence: Synthetic polypeptide
  misc_feature (239)..(239): Xaa can be any naturally occurring amino acid
MAADGYLPDWLEDNLSEGIREWWDLKPGAPKPKANQQKQDDGRGLVLPGYKYLGPFNGLDKGEPVNAADAAALEHDKAYDQQLQAGDNPYLRYNHADAEFQERLQGDTSFGGNLGRAVFQAKKRVLEPLGLVEEAAKTAPGKKRPVEQSPQEPDSSAGIGKSGAQPAKKRLNFGQTGDTESVPDPQPIGEPPAAPSGVGPNTMAAGGGAPMADNNEGADGVGSSSGNWHCDSTWLGDRXITTSTRTWALPTYNNHLYKQISSASTGASNDNHYFGYSTPWGYFDFNRFHCHFSPRDWQRLINNNWGFRPKRLNFKLFNIQVKEVTDNNGVKTIANNLTSTVQVFTDSEYQLPYVLGSAHQGCLPPFPADVFMIPQYGYLTLNNGSQAVGRSSFYCLEYFPSQMLRTGNNFTFSYTFEDVPFHSSYAHSQSLDRLMNPLIDQYLYYLSRTQTTGGTANTQTLGFSQGGPNTMANQAKNWLPGPCYRQQRVSTTTGQNNNSNFAWTAGTKYHLNGRNSLANPGIAMATHKDDKERFFPSNGILIFGKQNAARDNADYSDVMLTSEEEIKTTNPVATEEYGIVADNFQQQNTAPQIGTVNSQGALPGMVWQNRDVYLQGPIWAKIPHTDGNFHPSPLMGGFGLKHPPPQILIKNTPVPADPPTTFNQSKLNSFITQYSTGQVSVEIEWELQKENSKRWNPEIQYTSNYYKSTSVDFAVNTEGVYSEPHPIGTRYLTRPL

SEQ ID NO: 1657 - protein, 736 aa, Artificial Sequence
  Description of Artificial Sequence: Synthetic polypeptide
MAADGYLPDWLEDNLSEGIREWWALKPGAPKPKANQQKQDDGRGLVLPGYKYLGPFNGLDKGEPVNEADAAALEHDKAYDQQLKAGDNPYLKYNHADAEFQERLQEDTSFGGNLGRAVFQAKKRLLEPLGLVEEAAKTAPGKKRPVEQSPQEPDSSAGIGKSGAQPAKKRLNFGQTGDTESVPDPQPLGEPPATPAAVGPTTMASGGGAPMADNNEGADGVGNASGNWHCDSTWLGDRVITTSTRTWALPTYNNHLYKQISSASTGASNDNHYFGYSTPWGYFDFNRFHCHFSPRDWQRLINNNWGFRPKRLSFKLFNIQVKEVTQNEGTKTIANNLTSTIQVFTDSEYQLPYVLGSAHQGCLPPFPADVFMIPQYGYLTLNNGSQAVGRSSFYCLEYFPSQMLRTGNNFQFTYTFEDVPFHSSYAHSQSLDRLMNPLIDQYLYYLSRTQTTGGTANTQTLGFSQGGPNTMANQAKNWLPGPCYRQQRVSTTTGQNNNSNFAWTAGTKYHLNGRNSLANPGIAMATHKDDKERFFPSNGILIFGKQNAARDNADYSDVMLTSEEEIKTTNPVATEEYGIVADNLQQQNTAPQIGTVNSQGALPGMVWQNRDVYLQGPIWAKIPHTDGNFHPSPLMGGFGLKHPPPQILIKNTPVPADPPTTFNQSKLNSFITQYSTGQVSVEIEWELQKENSKRWNPEIQYTSNYYKSTSVDFAVNTEGVYSEPHPIGTRYLTRPL

SEQ ID NO: 1658 - protein, 736 aa, Artificial Sequence
  Description of Artificial Sequence: Synthetic polypeptide
MAADGYLPDWLEDTLSEGIRQWWKLKPGPPPPKPAERHKDDSRGLVLPGYKYLGPFNGLDKGEPVNEADAAALEHDKAYDQQLQAGDNPYLRYNHADAEFQERLQGDTSFGGNLGRAVFQAKKRLLEPLGLVEEAAKTAPGKKRPVEQSPQEPDSSAGIGKSGAQPAKKRLNFGQTGDTESVPDPQPIGEPPAAPSGVGSLTMASGGGAPVADNNEGADGVGSSSGNWHCDSQWLGDRVITTSTRTWALPTYNNHLYKQISSASTGASNDNHYFGYSTPWGYFDFNRFHCHFSPRDWQRLINNNWGFRPKRLSFKLFNIQVKEVTQNEGTKTIANNLTSTIQVFTDSEYQLPYVLGSAHQGCLPPFPADVFMIPQYGYLTLNNGSQAVGRSSFYCLEYFPSQMLRTGNNFQFTYTFEDVPFHSSYAHSQSLDRLMNPLIDQYLYYLSRTQTTGGTANTQTLGFSQGGPNTMANQAKNWLPGPCYRQQRVSTTTGQNNNSNFAWTAGTKYHLNGRNSLANPGIAMATHKDDKERFFPSNGILIFGKQNAARDNADYSDVMLTSEEEIKTTNPVATEEYGIVADNLQQQNTAPQIGTVNSQGALPGMVWQNRDVYLQGPIWAKIPHTDGNFHPSPLMGGFGLKHPPPQILIKNTPVPADPPTTFNQSKLNSFITQYSTGQVSVEIEWELQKENSKRWNPEIQYTSNYYKSTSVDFAVNTEGVYSEPHPIGTRYLTRPL

SEQ ID NO: 1659 - protein, 738 aa, Artificial Sequence
  Description of Artificial Sequence: Synthetic polypeptide
MAADGYLPDWLEDNLSEGIRQWWKLKPGPPPPKPAERHKDDSRGLVLPGYKYLGPFNGLDKGEPVNAADAAALEHDKAYDQQLKAGDNPYLRYNHADAEFQERLQEDTSFGGNLGRAVFQAKKRVLEPLGLVEEGAKTAPGKKRPVEPSPQRSPDSSTGIGKKGQQPAKKRLNFGQTGDSESVPDPQPLGEPPATPAAVGPTTMASGGGAPMADNNEGADGVGNASGNWHCDSTWLGDRVITTSTRTWALPTYNNHLYKQISNGTSGGSTNDNTYFGCVTPWGYFDFNKFHCHFSPDDWQRLINNGWGFRTKRLNFKLFSMKVKKGTDNTGIKTIANNLTNTVHVFADSEYQLPYVLGSAHQGCLPPFPADVFMIPQYGYLTLNNGSQAVGRSSFYCLEYFPSQMLRTGNNFTFSYTFEDVPFHSSYAHSQSLDRLMNPLIDQYLYYLSRTQTTGGTANTQTLGFSQGGPNTMANQAKNWLPGPCYRQQRVSTTTGQNNNSNFAWTAGTKYHLNGRNSLANPGIAMATHKDDKERFFPSNGILIFGKQNAARDNADYSDVMLTSEEEIKTTNPVATEEYGIVADNLQQQNTAPQIGTVNSQGALPGMVWQNRDVYLQGPIWAKIPHTDGNFHPSPLMGGFGLKHPPPQILIKNTPVPADPPTTFNQSKLNSFITQYSTGQVSVEIEWELQKENSKRWNPEIQYTSNYYKSTSVDFAVNTEGVYSEPHPIGTRYLTRPL

SEQ ID NO: 1660 - protein, 737 aa, Artificial Sequence
  Description of Artificial Sequence: Synthetic polypeptide
MAADGYLPDWLEDTLSEGIRQWWKLKPGPPPPKPAERHKDDSRGLVLPGYKYLGPFNGLDKGEPVNAADAAALEHDKAYDQQLKAGDNPYLRYNHADAEFQERLQEDTSFGGNLGRAVFQAKKRVLEPLGLVEEGAKTAPGKKRPVEPSPQRSPDSSTGIGKKGQQPAKKRLNFGQTGDSESVPDPQPIGEPPAGPSGLGSGTMAAGGGAPMADNNEGADGVGSSSGNWHCDSTWLGDRVITTSTRTWALPTYNNHLYKQISSASTGASNDNHYFGYSTPWGYFDFNRFHCHFSPRDWQRLINNNWGFRPKRLNFKLFNIQVKEVTDNNGVKTIANNLTSTVQVFTDSEYQLPYVLGSAHQGCLPPFPADVFMIPQYGYLTLNNGSQAVGRSSFYCLEYFPSQMLRTGNNFTFSYTFEDVPFHSSYAHSQSLDRLMNPLIDQYLYYLSRTQTTGGTANTQTLGFSQGGPNTMANQAKNWLPGPCYRQQRVSTTTGQNNNSNFAWTAGTKYHLNGRNSLANPGIAMATHKDDKERFFPSNGILIFGKQNAARDNADYSDVMLTSEEEIKTTNPVATEEYGIVADNLQQQNTAPQIGTVNSQGALPGMVWQNRDVYLQGPIWAKILHTDGNFHPSPLMGGFGMKHPPPPILIKNTPVPADPPTTFNQSKLNSFITQYSTGQVSVEIEWELPKENSKRWNPEIQYTSNYYKSTSVDFAVNTEGVYYEPHPIGTRYLTPPL

SEQ ID NO: 1661 - protein, 737 aa, Artificial Sequence
  Description of Artificial Sequence: Synthetic polypeptide
MAADGYLPDWLEDNLSEGIREWWALKPGAPKPKANQQKQDDGRGLVLPGYKYLGPFNGLDKGEPVNAADAAALEHDKAYDQQLKAGDNPYLRYNHADAEFQERLQEDTSFGGNLGRAVFQAKKRVLEPLGLVEEGAKTAPGKKRPVEPSPQRSPDSSTGIGKKGQQPARKRLNFGQTGDSESVPDPQPLGEPPAAPSGVAPNTMAAGGGAPMADNNEGADGVGNASGNWHCDSTWLGDRVITTSTRTWALPTYNNHLYKQISSASTGASNDNHYFGYSTPWGYFDFNRFHCHFSPRDWQRLITTIGGFRPKRLNFKLFNIQVKEVTDNNGVKTIANNLTSTVQVFTDSEYQLPYVLGSAHQGCLPPFPADVFMIPQYGYLTLNNGSQAVGRSSFYCLEYFPSQMLRTGNNFTFSYTFEDVPFHSSYAHSQSLDRLMNPLIDQYLYYLSRTQTTGGTANTQTLGFSQGGPNTMANQAKNWLPGPCYRQQRVSTTTGQNNNSNFAWTAGTKYHLNGRNSLANPGIAMATHKDDKERFFPSNGILIFGKQNAARDNADYSDVMLTSEEEIKTTNPVATEEYGIVADNLQQQNTAPQIGTVNSQGALPGMVWQNRDVYLQGPIWAKIPHTDGNFHPSPLMGGFGLKHPPPQILIKNTPVPADPPTTFNQSKLNSFITQYSTGQVSVEIEWELQKENSKRWNPEIQYTSNYYKSTSVDFAVNTEGVYSEPHPIGTRYLTRPL

SEQ ID NO: 1662 - protein, 736 aa, Artificial Sequence
  Description of Artificial Sequence: Synthetic polypeptide
MAADGYLPDWLEDTLSEGIRQWWKLKPGPPPPKPAERHKDDGRGLVLPGYKYLGPFNGLDKGEPVNAADAAALEHDKAYDQQLKAGDNPYLRYNHADAEFQERLQEDTSFGGNLGRAVFQAKKRVLEPLGLVEEPVKTAPGKKRPVEQSPQEPDSSSGIGKKGQQPAKKRLNFGQTGDSESVPDPQPLGEPPATPAAVGPTTMASGGGAPMADNNEGADGVGNASGNWHCDSTWMGDRVITTSTRTWALPTYNNHLYKQISSASTGASNDNHYFGYSTPWGYFDFNRFHCHFSPRDWQRLINNNWGFRPKRLNFKLFNIQVKEVTQNEGTKTIANNLTSTIQVFTDSEYQLPYVLGSAHQGCLPPFPADVFMIPQYGYLTLNNGSQAVGRSSFYCLEYFPSQMLRTGNNFQFTYTFEDVPFHSSYAHSQSLDRLMNPLIDQYLYYLSRTQTTGGTANTQTLGFSQGGPNTMANHAKNWLPGPCYRQQRVSTTTGQNNNSNFAWTAGTKYHLNGRNSLANPGIAMATHKDDKERFFPSNGILIFGKQNAARDNADYSDVMLTSEEEIKTTNPVATEEYGIVADNLQQQNTAPQIGTVNSQGALPGMVWQNRDVYLQGPIWAKIPHTDGNFHPSPLMGGFGLKHPPPQILIKNTPVPADPPTTFNQSKLNSFITQYSTGQVSVEIEWELQKENSKRWNPEIQYTSNYYKSTSVDFAVNTEGVYSEPHPIGTRYLTRPL

SEQ ID NO: 1663 - protein, 737 aa, Artificial Sequence
  Description of Artificial Sequence: Synthetic polypeptide
MAADGYLPDWLEDNLSQGIREWWDLKPGAPKPKANQQKQDDGRGLVLPGYKYLGPFNGLDKGEPVNAADAAALEHDKAYDQQLKAGDNPYLRYNHADAEFQERLQEDTSFGGNLGRAVFQAKKRVLEPLGLVEEGAKTAPGKKRPVEPSPQRSPDSSTGIGKKGQQPARKRLNFGQTGDSESVPDPQPLGEPPAAPAAVGPTTMASGGGAPMADNNEGADGVGSSSGNWHCDSQWLGDRVITTSTRTWALPTYNNHLYKQISSASTGASNDNHYFGYSTPWGYFDFNRFHCHFSPRDWQRLINNNWGFRPKRLSFKLFNIQVKEVTQNEGTKTIANNLTSTIQVFTDSEYQLPYVLGSAHQGCLPPFPADVFMIPQYGYLTLNNGSQAVGRSSFYCLEYFPSQMLRTGNNFQFTYTFEDVPFHSSYAHSQSLDRLMNPLIDQYLYYLSRTQTTGGTTNAQTLGFSQGGPNTMANQAKNWLPGPCYRQQRVSTTTGQNNNSNFAWTAGTKYHLNGRNSLANPGIAMATHKDDKERFFPSNGILIFGKQNAARDNADYSDVMLTSEEEIKTTNPVATEEYGIVADNLQQQNTAPQIGTVNSQGALPGMVWQNRDVYLQGPIWAKIPHTDGNFHPSPLMGGFGLKHPPPQILIKNTPVPADPPTTFNQSKLNSFITQYSTGQVSVEIEWELQKENSKRWNPEIQYTSNYYKSTNVDFAVNTEGVYSEPHPIGTRYLTRPL

SEQ ID NO: 1664 - protein, 736 aa, Artificial Sequence
  Description of Artificial Sequence: Synthetic polypeptide
MAADGYLPDWLEDNLSEGIREWWDLKPGAPKPKANQQKQDDGRGLVLPGYKYLGPFNGLDKGEPVNAADAAALEHDKAYDQQLKAGDNPYLRYNHADAEFQERLQEDTSFGGNLGRAVFQAKKRVLEPFGLVEEGAKTAPGKKRPVEQSPQEPDSSSGIGKTGQQPAKKRLNFGQTGDTESVPDPQPIGEPPAAPSGVGPNTMAAGGGAPMADNNEGADGVGSSSGNWHCDSTWMGDRVITTSTRTWALPTYNNHLYKQISSASTGASNDNHYFGYSTPWGYFDFNRFHCHFSPRDWQRLINNNWGFRPKRLNFKLFNIQVKEVTQNEGTKTIANNLTSTIQVFTDSEYQLPYVLGSAHQGCLPPFPADVFMIPQYGYLTLNNGSQAVGRSSFYCLEYFPSQMLRTGNNFQFTYTFEDVPFHSSYAHSQSLDRLMNPLIDQYLYYLSRTQTTGGTANTQTLGFSQGGPNTMANQAKNWLPGPCYRQQRVSTTTGQNNNSNFAWTAGTKYHLNGRNSLANPGIAMATHKDDKERFFPSNGILIFGKQNAARDNADYSDVMLTSEEEIKTTNPVATEEYGIVADNLQQQNTAPQIGTVNSQGALPGMVWQNRDVYLQGPIWAKIPHTDGNFHPSPLMGGFGLKHPPPQILIKNTPVPADPPTTFNQSKLNSFITQYSTGQVSVEIEWELQKENSKRWNPEIQYTSNYYKSTNVDFAVNTEGVYSEPHPIGTRYFTRPL

SEQ ID NO: 1665 - protein, 736 aa, Artificial Sequence
  Description of Artificial Sequence: Synthetic polypeptide
MAADGYLPDWLEDNLSEGIREWWDLKPGAPKPKANQQKQDDGRGLVLPGYKYLGPFNGLDKGEPVNAADAAALEHDKAYDQQLKAGDNPYLRYNHADAEFQERLQEDTSFGGNLGRAVFQAKKRVLEPLGLVEEGAKTAPGKKRPVEQSPQEPDSSSGIGKTGQQPAKKRLNFGQTGDSESVPDPQPLGEPPATPAAVGPTTMASGGGAPMADNNEGADGVGNSSGNWHCDSTWMGDRVITTSTRTWALPTYNNHLYKQISSASTGASNDNHYFGYSTPWGYFDFNRFHCHFSPRDWQRLINNNWGFRPKRLNFKLFNIQVKEVTDNNGVKTIANNLTSTVQVFTDSEYQLPYVLGSAHQGCLPPFPADVFMIPQYGYLTLNNGSQAVGRSSFYCLEYFPSQMLRTGNNFQFTYTFEDVPFHSSYAHSQSLDRLMNPLIDQYLYYLSRTQTTGGTANTQTLGFSQGGPNTMANQAKNWLPGPCYRQQRVSTTTGQNNNSNFAWTAGTKYHLNGRNSLANPGIAMATHKDDKERFFPSNGILIFGKQNAARDNADYSDVMLTSEEEIKTTNPVATEEYGIVADNLQQQNTAPQIGTVNSQGALPGMVWQNRDVYLQGPIWAKIPHTDGNFHPSPLMGGFGLKHPPPQILIKNTPVPADPPTTFNQSKLNSFITQYSTGQVSVEIEWELQKENSKRWNPEIQYTSNYYKSTNVDFAVNTEGVYSEPHPIGTRYLTRPL

SEQ ID NO: 1666 - protein, 736 aa, Artificial Sequence
  Description of Artificial Sequence: Synthetic polypeptide
MAADGYLPDWLEDNLSEGIREWWDLKPGAPKPKANQQKQDDGRGLVLPGYKYLGPFNGLDKGEPVNAADAAALEHDKAYDQQLKAGDNPYLRYNHADAEFQERLQEDTSFGGNLGRAVFQAKKRVLEPLGLVEEGAKTAPGKKRPVEQSPQEPDSSSGIGKTGQQPAKKRLNFGQTGDSESVPDPQPLGEPPATPAAVGPTTMASGGGAPMADNNEGADGVGNASGNWHCDSTWLGDRVITTSTRTWALPTYNNHLYKQISSASTGASNDNHYFGYSTPWGYFDFNRFHCHFSPRDWQRLINNNWGFRPKRLNFKLFNIQVKEVTQNEGTKTIANNLTSTIQVFTDSEYQLPYVLGSAHQGCLPPFPADVFMIPQYGYLTLNNGSQAVGRSSFYCLEYFPSQMLRTGNNFEFSYQFEDVPFHSSYAHSQSLDRLMNPLIDQYLYYLSRTQTTGGTANTQTLGFSQGGPNTMANQAKNWLPGPCYRQQRVSTTTGQNNNSNFAWTAGTKYHMNGRNSLVNPGIAMATHKDDKERFFPSNGILIFGKQNVARDNADYSDVMLTSEEEIKTTNPVATEEYGIVADNLQQQNTAPQIGTVNSQGALPGMVWQNRDVYLQGPIWAKIPHTDGNFHPSPLMGGFGLKHPPPQILIKNTPVPADPPTTFNQSKLNSFITQYSTGQVSVEIEWELQKENSKRWNPEIQYTSNYYKSTSVDFAVNTEGVYSEPHPIGTRYLTRPL

SEQ ID NO: 1667 - DNA, 2217 bp, Artificial Sequence
  Description of Artificial Sequence: Synthetic polynucleotide
atggctgccgatggttatcttccagattggctcgaggacaacctctctgagggcattcgcgagtggtgggcgctgaaacctggagccccgaagcccaaagccaaccagcaaaagcaggacgacggccggggtctggtgcttcctggctacaagtacctcggacccttcaacggactcgacaagggggagcccgtcaacgcggcggacgcagcggccctcgagcacgacaaggcctacgaccagcagctgcaggcgggtgacaatccgtacctgcggtataaccacgccgacgccgagtttcaggagcgtctgcaagaagatacgtcttttgggggcaacctcgggcgagcagtcttccaggccaagaagcgggttctcgaacctctcggtctggttgaggaaggcgctaagacggctcctggaaagaagagaccggtagagccatcaccccagcgttctccagactcctctacgggcatcggcaagaaaggccaacagcccgccagaaaaagactcaattttggtcagactggcgactcagagtcagttccagaccctcaacctctcggagaacctccagcagcgccctctggtgtgggacctaatacaatggctgcaggcggtggcgcaccaatggcagacaataacgaaggcgccgacggagtgggtagttcctcgggaaattggcattgcgattccacatggctgggcgacagagtcatcaccaccagcacccgaacctgggccctgcccacctacaacaaccacctctacaagcaaatctccaacgggacatcgggaggagccaccaacgacaacacctacttcggctacagcaccccctgggggtattttgactttaacagattccactgccacttttcaccacgtgactggcagcgactcatcaacaacaactggggattccggcccaagagactcagcttcaagctcttcaacatccaggtcaaggaggtcacgcagaatgaaggcaccaagaccatcgccaataacctcaccagcaccatccaggtgtttacggactcggagtaccagctgccgtacgttctcggctctgcccaccagggctgcctgcctccgttcccggcggacgtgttcatgattccccagtacggctacctaacactcaacaacggtagtcaggccgtgggacgctcctccttctactgcctggaatactttccttcgcagatgctgagaaccggcaacaacttccagtttacttacaccttcgaggacgtgcctttccacagcagctacgcccacagccagagcttggaccggctgatgaatcctctgattgaccagtacctgtactacttgtctcggactcaaacaacaggaggcacggcaaatacgcagactctgggcttcagccaaggtgggcctaatacaatggccaatcaggcaaagaactggctgccaggaccctgttaccgccaacaacgcgtctcaacgacaaccgggcaaaacaacaatagcaactttgcctggactgctgggaccaaataccatctgaatggaagaaattcattggctaatcctggcatcgctatggcaacacacaaagacgacgaggagcgtttttttcccagtaacgggatcctgatttttggcaaacaaaatgctgccagagacaatgcggattacagcgatgtcatgctcaccagcgaggaagaaatcaaaaccactaaccctgtggctacagaggaatacggtatcgtggcagataacttgcagcagcaaaacacggctcctcaaattggaactgtcaacagccagggggccttacccggtatggtttggcagaaccgggacgtgtacctgcagggtcccatctgggccaagattcctcacacggacggcaacttccacccgtctccgctgatgggcggctttggcctgaaacatcctccgcctcagatcctgatcaagaacacgcctgtacctgcggatcctccgaccaccttcaaccagtcaaagctgaactctttcatcacgcaatacagcaccggacaggtcagcgtggaaattgaatgggagctgcagaaggaaaacagcaagcgctggaaccccgagatccagtacacctccaactactacaaatctacaagtgtggactttgctgttaatacagaaggcgtgtactctgaaccccgccccattggcacccgttacctcacccgtaatctgtaa

SEQ ID NO: 1668 - protein, 738 aa, Artificial Sequence; identical to SEQ ID NO: 105
  Description of Artificial Sequence: Synthetic polypeptide

SEQ ID NO: 1669 - protein, 735 aa, Artificial Sequence
  Description of Artificial Sequence: Synthetic polypeptide
MAADGYLPDWLEDNLSEGVREWWALQPGAPKPKANQQHQDNARGLVLPGYKYLGPGNGLDKGEPVNAADAAALEHDKAYDQQLKAGDNPYLKYNHADAEFQQRLQGDTSFGGNLGRAVFQAKKRVLEPLGLVEQAGETAPGKKRPLIESPQQPDSSTGIGKKGKQPAKKKLVFEDETGAGDGPPEGSTSGAMSDDSEMRAAAGGAAVEGGQGADGVGNASGDWHCDSTWSEGHVTTTSTRTWVLPTYNNHLYKRLGESLQSNTYNGFSTPWGYFDFNRFHCHFSPRDWQRLINNNWGMRPKAMRVKIFNIQVKEVTTSNGETTVANNLTSTVQIFADSSYELPYVMDAGQEGSLPPFPNDVFMVPQYGYCGLVTGNTSQQQTDRNAFYCLEYFPSQMLRTGNNFEITYSFEKVPFHSMYAHSQSLDRLMNPLIDQYLWGLQSTTTGTTLNAGTATTNFTKLRPTNFSNFKKNWLPGPSIKQQGFSKTANQNYKIPATGSDSLIKYETHSTLDGRWSALTPGPPMATAGPADSKFSNSQLIFAGPKQNGNTATVPGTLIFTSEEELAATNATDTDMWGNLPGGDQSNSNLPTVDRLTALGAVPGMVWQNRDIYYQGPIWAKIPHTDGHFHPSPLIGGFGLKHPPPQIFIKNTPVPANPATTFSSTPVNSFITQYSTGQVSVQIDWEIQKERSKRWNPEVQFTSNYGQQNSLLWAPDAAGKYTEPRAIGTRYLTHHL

SEQ ID NO: 1670 - protein, 735 aa, Artificial Sequence
  Description of Artificial Sequence: Synthetic polypeptide
MAADGYLPDWLEDNLSEGVREWWALQPGAPKPKANQQHQDNARGLVLPGYKYLGPGNGLDKGEPVNAADAAALEHDKAYDQQLKAGDNPYLKYNHADAEFQQRLQGDTSFGGNLGRAVFQAKKRVLEPLGLVEQAGETAPGKKRPLIESPQQPDSSTGIGKKGKQPAKKKLVFEDETGAGDGPPEGSTSGAMSDDSEMRAAAGGAAVEGGQGADGVGNASGDWHCDSTWSEGHVTTTSTRTWVLPTYNNHLYKRLGESLQSNTYNGFSTPWGYFDFNRFHCHFSPRDWQRLINNNWGMRPKAMRVKIFNIQVKEVTTSNGETTVANNLTSTVQIFADSSYELPYVMDAGQEGSLPPFPNDVFMVPQYGYCGLVTGNTSQQQTDRNAFYCLEYFPSQMLRTGNNFEITYSFEKVPFHSMYAHSQSLDRLMNPLIDQYLWGLQSTTTGTTLNAGTATTNFTKLRPTNFSNFKKNWLPGPSIKQQGFSKTANQNYLIPATGSDSLIRYETHSTLDGRWSALTPGPPMATAGPADSKFSNSQLIFAGPKQNGNTATVPGTLIFTSEEELAATNATDTDMWGNLPFRDLSSSNLPTVDRSTPLGAVPGMVWQNRDIYYQGPIWAKIPHTDGHFHPSPLIGGFGLKHPPPQIFIKNTPVPANPATTFSSTPVNSFITQYSTGQVSVQIDWEIQKERSKRWNPEVQFTSNYGQQNSLLWAPDAAGKYTEPRAIGTRYLTHHL

SEQ ID NO: 1671 - protein, 735 aa, Artificial Sequence
  Description of Artificial Sequence: Synthetic polypeptide
MAADGYLPDWLEDNLSEGVREWWALQPGAPKPKANQQHQDNARGLVLPGYKYLGPGNGLDKGEPVNAADAAALEHDKAYDQQLKAGDNPYLKYNHADAEFQQRLQGDTSFGGNLGRAVFQAKKRVLEPLGLVEQAGETAPGKKRPLIESPQQPDSSTGIGKKGKQPAKKKLVFEDETGAGDGPPEGSTSGAMSDDSEMRAAAGGAAVEGGQGADGVGNASGDWHCDSTWSEGHVTTTSTRTWVLPTYNNHLYKRLGESLQSNTYNGFSTPWGYFDFNRFHCHFSPRDWQRLINNNWGMRPKAMRVKIFNIQVKEVTTSNGETTVANNLTSTVQIFADSSYELPYVMDAGQEGSLPPFPNDVFMVPQYGYCGLVTGNTSQQQTDRNAFYCLEYFPSQMLRTGNNFEITYSFEKVPFHSMYAHSQSLDRLMNPLIDQYLWGLQSTTTGTTLNAGTATTNFTKLRPTNFSNFKKNWLPGPSIKQQGFSKTANQNYYIPATGSDSLILYETHSTLDGRWSALTPGPPMATAGPADSKFSNSQLIFAGPKQNGNTATVPGTLIFTSEEELAATNATDTDMWGNLPGGDQSNSNLPTVDRLTALGAVPGMVWQNRDIYYQGPIWAKIPHTDGHFHPSPLIGGFGLKHPPPQIFIKNTPVPANPATTFSSTPVNSFITQYSTGQVSVQIDWEIQKERSKRWNPEVQFTSNYGQQNSLLWAPDAAGKYTEPRAIGTRYLTHHL

SEQ ID NO: 1672 - protein, 735 aa, Artificial Sequence
  Description of Artificial Sequence: Synthetic polypeptide
MAADGYLPDWLEDNLSEGVREWWALQPGAPKPKANQQHQDNARGLVLPGYKYLGPGNGLDKGEPVNAADAAALEHDKAYDQQLKAGDNPYLKYNHADAEFQQRLQGDTSFGGNLGRAVFQAKKRVLEPLGLVEQAGETAPGKKRPLIESPQQPDSSTGIGKKGKQPAKKKLVFEDETGAGDGPPEGSTSGAMSDDSEMRAAAGGAAVEGGQGADGVGNASGDWHCDSTWSEGHVTTTSTRTWVLPTYNNHLYKRLGESLQSNTYNGFSTPWGYFDFNRFHCHFSPRDWQRLINNNWGMRPKAMRVKIFNIQVKEVTTSNGETTVANNLTSTVQIFADSSYELPYVMDAGQEGSLPPFPNDVFMVPQYGYCGLVTGNTSQQQTDRNAFYCLEYFPSQMLRTGNNFEITYSFEKVPFHSMYAHSQSLDRLMNPLIDQYLWGLQSTTTGTTLNAGTATTNFTKLRPTNFSNFKKNWLPGPSIKQQGFSKTANQNYGIPATGSDSLIKYETHSTLDGRWSALTPGPPIATAGPADSKFSNSQLIFAGPKQNGNTATVPGTLIFTSEEELAATNATDTDMWGNLPLYDASSSNLPTVDRLTLLGAVPGMVWQNRDIYYQGPIWAKIPHTDGHFHPSPLIGGFGLKHPPPQIFIKNTPVPANPATTFSSTPVNSFITQYSTGQVSVQIDWEIQKERSKRWNPEVQFTSNYGQQNSLLWAPDAAGKYTEPRAIGTRYLTHHL

SEQ ID NO: 1673 - protein, 735 aa, Artificial Sequence
  Description of Artificial Sequence: Synthetic polypeptide
MAADGYLPDWLEDNLSEGVREWWALQPGAPKPKANQQHQDNARGLVLPGYKYLGPGNGLDKGEPVNAADAAALEHDKAYDQQLKAGDNPYLKYNHADAEFQQRLQGDTSFGGNLGRAVFQAKKRVLEPLGLVEQAGETAPGKKRPLIESPQQPDSSTGIGKKGKQPAKKKLVFEDETGAGDGPPEGSTSGAMSDDSEMRAAAGGAAVEGGQGADGVGNASGDWHCDSTWSEGHVTTTSTRTWVLPTYNNHLYKRLGESLQSNTYNGFSTPWGYFDFNRFHCHFSPRDWQRLINNNWGMRPKAMRVKIFNIQVKEVTTSNGETTVANNLTSTVQIFADSSYELPYVMDAGQEGSLPPFPNDVFMVPQYGYCGLVTGNTSQQQTDRNAFYCLEYFPSQMLRTGNNFEITYSFEKVPFHSMYAHSQSLDRLMNPLIDQYLWGLQSTTTGTTLNAGTATTNFTKLRPTNFSNFKKNWLPGPSIKQQGFSKTANQNYTIPATGSDSLITYETHSTLDGRWSALTPGPPGATAGPADSKFSNSQLIFAGPKQNGNTATVPGTLIFTSEEELAATNATDTDMWGNLPRVDTSASNLPTVDRYTNLGAVPGMVWQNRDIYYQGPIWAKIPHTDGHFHPSPLIGGFGLKHPPPQIFIKNTPVPANPATTFSSTPVNSFITQYSTGQVSVQIDWEIQKERSKRWNPEVQFTSNYGQQNSLLWAPDAAGKYTEPRAIGTRYLTHHL

SEQ ID NO: 1674 - protein, 735 aa, Artificial Sequence
  Description of Artificial Sequence: Synthetic polypeptide
MAADGYLPDWLEDNLSEGVREWWALQPGAPKPKANQQHQDNARGLVLPGYKYLGPGNGLDKGEPVNAADAAALEHDKAYDQQLKAGDNPYLKYNHADAEFQQRLQGDTSFGGNLGRAVFQAKKRVLEPLGLVEQAGETAPGKKRPLIESPQQPDSSTGIGKKGKQPAKKKLVFEDETGAGDGPPEGSTSGAMSDDSEMRAAAGGAAVEGGQGADGVGNASGDWHCDSTWSEGHVTTTSTRTWVLPTYNNHLYKRLGESLQSNTYNGFSTPWGYFDFNRFHCHFSPRDWQRLINNNWGMRPKAMRVKIFNIQVKEVTTSNGETTVANNLTSTVQIFADSSYELPYVMDAGQEGSLPPFPNDVFMVPQYGYCGLVTGNTSQQQTDRNAFYCLEYFPSQMLRTGNNFEITYSFEKVPFHSMYAHSQSLDRLMNPLIDQYLWGLQSTTTGTTLNAGTATTNFTKLRPTNFSNFKKNWLPGPSIKQQGFSKTANQNYSIPATGSDSLIKYETHSTLDGRWSALTPGPPFATAGPADSKFSNSQLIFAGPKQNGNTATVPGTLIFTSEEELAATNATDTDMWGNLPDYDSSLSNLPTVDRDTTLGAVPGMVWQNRDIYYQGPIWAKIPHTDGHFHPSPLIGGFGLKHPPPQIFIKNTPVPANPATTFSSTPVNSFITQYSTGQVSVQIDWEIQKERSKRWNPEVQFTSNYGQQNSLLWAPDAAGKYTEPRAIGTRYLTHHL

SEQ ID NO: 1675 - protein, 735 aa, Artificial Sequence
  Description of Artificial Sequence: Synthetic polypeptide
MAADGYLPDWLEDNLSEGVREWWALQPGAPKPKANQQHQDNARGLVLPGYKYLGPGNGLDKGEPVNAADAAALEHDKAYDQQLKAGDNPYLKYNHADAEFQQRLQGDTSFGGNLGRAVFQAKKRVLEPLGLVEQAGETAPGKKRPLIESPQQPDSSTGIGKKGKQPAKKKLVFEDETGAGDGPPEGSTSGAMSDDSEMRAAAGGAAVEGGQGADGVGNASGDWHCDSTWSEGHVTTTSTRTWVLPTYNNHLYKRLGESLQSNTYNGFSTPWGYFDFNRFHCHFSPRDWQRLINNNWGMRPKAMRVKIFNIQVKEVTTSNGETTVANNLTSTVQIFADSSYELPYVMDAGQEGSLPPFPNDVFMVPQYGYCGLVTGNTSQQQTDRNAFYCLEYFPSQMLRTGNNFEITYSFEKVPFHSMYAHSQSLDRLMNPLIDQYLWGLQSTTTGTTLNAGTATTNFTKLRPTNFSNFKKNWLPGPSIKQQGFSKTANQNYSIPATGSDSLIWYETHSTLDGRWSALTPGPPCATAGPADSKFSNSQLIFAGPKQNGNTATVPGTLIFTSEEELAATNATDTDMWGNLPQGDSSLSNLPTVDRMTVLGAVPGMVWQNRDIYYQGPIWAKIPHTDGHFHPSPLIGGFGLKHPPPQIFIKNTPVPANPATTFSSTPVNSFITQYSTGQVSVQIDWEIQKERSKRWNPEVQFTSNYGQQNSLLWAPDAAGKYTEPRAIGTRYLTHHL

SEQ ID NO: 1676 - protein, 735 aa, Artificial Sequence
  Description of Artificial Sequence: Synthetic polypeptide
MAADGYLPDWLEDNLSEGVREWWALQPGAPKPKANQQHQDNARGLVLPGYKYLGPGNGLDKGEPVNAADAAALEHDKAYDQQLKAGDNPYLKYNHADAEFQQRLQGDTSFGGNLGRAVFQAKKRVLEPLGLVEQAGETAPGKKRPLIESPQQPDSSTGIGKKGKQPAKKKLVFEDETGAGDGPPEGSTSGAMSDDSEMRAAAGGAAVEGGQGADGVGNASGDWHCDSTWSEGHVTTTSTRTWVLPTYNNHLYKRLGESLQSNTYNGFSTPWGYFDFNRFHCHFSPRDWQRLINNNWGMRPKAMRVKIFNIQVKEVTTSNGETTVANNLTSTVQIFADSSYELPYVMDAGQEGSLPPFPNDVFMVPQYGYCGLVTGNTSQQQTDRNAFYCLEYFPSQMLRTGNNFEITYSFEKVPFHSMYAHSQSLDRLMNPLIDQYLWGLQSTTTGTTLNAGTATTNFTKLRPTNFSNFKKNWLPGPSIKQQGFSKTANQNYCIPATGSDSLIRYETHSTLDGRWSALTPGPPLATAGPADSKFSNSQLIFAGPKQNGNTATVPGTLIFTSEEELAATNATDTDMWGNLPYKDSSRSNLPTVDRETSLGAVPGMVWQNRDIYYQGPIWAKIPHTDGHFHPSPLIGGFGLKHPPPQIFIKNTPVPANPATTFSSTPVNSFITQYSTGQVSVQIDWEIQKERSKRWNPEVQFTSNYGQQNSLLWAPDAAGKYTEPRAIGTRYLTHHL

SEQ ID NO: 1677 - protein, 735 aa, Artificial Sequence
  Description of Artificial Sequence: Synthetic polypeptide
MAADGYLPDWLEDNLSEGVREWWALQPGAPKPKANQQHQDNARGLVLPGYKYLGPGNGLDKGEPVNAADAAALEHDKAYDQQLKAGDNPYLKYNHADAEFQQRLQGDTSFGGNLGRAVFQAKKRVLEPLGLVEQAGETAPGKKRPLIESPQQPDSSTGIGKKGKQPAKKKLVFEDETGAGDGPPEGSTSGAMSDDSEMRAAAGGAAVEGGQGADGVGNASGDWHCDSTWSEGHVTTTSTRTWVLPTYNNHLYKRLGESLQSNTYNGFSTPWGYFDFNRFHCHFSPRDWQRLINNNWGMRPKAMRVKIFNIQVKEVTTSNGETTVANNLTSTVQIFADSSYELPYVMDAGQEGSLPPFPNDVFMVPQYGYCGLVTGNTSQQQTDRNAFYCLEYFPSQMLRTGNNFEITYSFEKVPFHSMYAHSQSLDRLMNPLIDQYLWGLQSTTTGTTLNAGTATTNFTKLRPTNFSNFKKNWLPGPSIKQQGFSKTANQNYIIPATGSDSLIYYETHSTLDGRWSALTPGPPRATAGPADSKFSNSQLIFAGPKQNGNTATVPGTLIFTSEEELAATNATDTDMWGNLPWIDNSRSNLPTVDRPTSLGAVPGMVWQNKNIYYQGPIWAKIPHTDGHFHPSPLIGGFGLKHPPPQIFIKNTPVPANPATTFTSTPVNSFITQYSTGQVSVQIDWEIQKERSKRWNPEVQFTSNYGQQNSLLWAPDAAGKYTEPRAIGTRYLTHHL

SEQ ID NO: 1678 - protein, 735 aa, Artificial Sequence
  Description of Artificial Sequence: Synthetic polypeptide
MAADGYLPDWLEDNLSEGVREWWALQPGAPKPKANQQHQDNARGLVLPGYKYLGPGNGLDKGEPVNAADAAALEHDKAYDQQLKAGDNPYLKYNHADAEFQQRLQGDTSFGGNLGRAVFQAKKRVLEPLGLVEQAGETAPGKKRPLIESPQQPDSSTGIGKKGKQPAKKKLVFEDETGAGDGPPEGSTSGAMSDDSEMRAAAGGAAVEGGQGADGVGNASGDWHCDSTWSEGHVTTTSTRTWVLPTYNNHLYKRLGESLQSNTYNGFSTPWGYFDFNRFHCHFSPRDWQRLINNNWGMRPKAMRVKIFNIQVKEVTTSNGETTVANNLTSTVQIFADSSYELPYVMDAGQEGSLPPFPNDVFMVPQYGYCGLVTGNTSQQQTDRNAFYCLEYFPSQMLRTGNNFEITYSFEKVPFHSMYAHSQSLDRLMNPLIDQYLWGLQSTTTGTTLNAGTATTNFTKLRPTNFSNFKKNWLPGPSIKQQGFSKTANQNYGIPATGSDSLIIYETHSTLDGRWSALTPGPPRATAGPADSKFSNSQLIFAGPKQNGNTATVPGTLIFTSEEELAATNATDTDMWGNLPGGDQSNSNLPTVDRLTALGAVPGMVWQNRDIYYQGPIWAKIPHTDGHFHPSPLIGGFGLKHPPPQIFIKNTPVPANPATTFSSTPVNSFITQYSTGQVSVQIDWEIQKERSKRWNPEVQFTSNYGQQNSLLWAPDAAGKYTEPRAIGTRYLTHHL

SEQ ID NO: 1679 - protein, 735 aa, Artificial Sequence
  Description of Artificial Sequence: Synthetic polypeptide
MAADGYLPDWLEDNLSEGVREWWALQPGAPKPKANQQHQDNARGLVLPGYKYLGPGNGLDKGEPVNAADAAALEHDKAYDQQLKAGDNPYLKYNHADAEFQQRLQGDTSFGGNLGRAVFQAKKRVLEPLGLVEQAGETAPGKKRPLIESPQQPDSSTGIGKKGKQPAKKKLVFEDETGAGDGPPEGSTSGAMSDDSEMRAAAGGAAVEGGQGADGVGNASGDWHCDSTWSEGHVTTTSTRTWVLPTYNNHLYKRLGESLQSNTYNGFSTPWGYFDFNRFHCHFSPRDWQRLINNNWGMRPKAMRVKIFNIQVKEVTTSNGETTVANNLTSTVQIFADSSYELPYVMDAGQEGSLPPFPNDVFMVPQYGYCGLVTGNTSQQQTDRNAFYCLEYFPSQMLRTGNNFEITYSFEKVPFHSMYAHSQSLDRLMNPLIDQYLWGLQSTTTGTTLNAGTATTNFTKLRPTNFSNFKKNWLPGPSIKQQGFSKTANQNYVIPATESDSLIYYETHSTLDGRWSALTPGPPYATAGPADSKFSNSQLIFAGPKQNGNTATVPGTLIFTSEEELAATNATDTDMWGNLPPRDDSTSNLPTVDRKTYLGAVPGMVWQNRDIYYQGPIWAKIPHTDGHFHPSPLIGGFGLKHPPPQIFIKNTPVPANPATTFSSTPVNSFITQYSTGQVSVQIDWEIQKERSKRWNPEVQFTSNYGQQNSLLWAPDAAGKYTEPRAIGTRYLTHHL

SEQ ID NO: 1680 - protein, 735 aa, Artificial Sequence
  Description of Artificial Sequence: Synthetic polypeptide
MAADGYLPDWLEDNLSEGVREWWALQPGAPKPKANQQHQDNARGLVLPGYKYLGPGNGLDKGEPVNAADAAALEHDKAYDQQLKAGDNPYLKYNHADAEFQQRLQGDTSFGGNLGRAVFQAKKRVLEPLGLVEQAGETAPGKKRPLIESPQQPDSSTGIGKKGKQPAKKKLVFEDETGAGDGPPEGSTSGAMSDDSEMRAAAGGAAVEGGQGADGVGNASGDWHCDSTWSEGHVTTTSTRTWVLPTYNNHLYKRLGESLQSNTYNGFSTPWGYFDFNRFHCHFSPRDWQRLINNNWGMRPKAMRVKIFNIQVKEVTTSNGETTVANNLTSTVQIFADSSYELPYVMDAGQEGSLPPFPNDVFMVPQYGYCGLVTGNTSQQQTDRNAFYCLEYFPSQMLRTGNNFEITYSFEKVPFHSMYAHSQSLDRLMNPLIDQYLWGLQSTTTGTTLNAGTATTNFTKLRPTNFSNFKKNWLPGPSIKQQGFSKTANQNYYIPATGSDSLIIYETHSTLDGRWSALTPGPPIATAGPADSKFSNSQLIFAGPKQNGNTATVPGTLIFTSEEELAATNSTDTDMWGNLPTDDDSRSNLPTVDRMTLLGAVPGMVWQNRDIYYQGPIWAKIPHTDGHFHPSPLIGGFGLKHPPPQIFIKNTPVPANPATTFSSTPVNSFITQYSTGQVSVQIDWEIQKERSKRWNPEVQFTSNYGQQNSLLWAPDAAGKYTEPRAIGTRYLTHHL

SEQ ID NO: 1681 - protein, 735 aa, Artificial Sequence
  Description of Artificial Sequence: Synthetic polypeptide
MAADGYLPDWLEDNLSEGVREWWALQPGAPKPKANQQHQDNARGLVLPGYKYLGPGNGLDKGEPVNAADAAALEHDKAYDQQLKAGDNPYLKYNHADAEFQQRLQGDTSFGGNLGRAVFQAKKRVLEPLGLVEQAGETAPGKKRPLIESPQQPDSSTGIGKKGKQPAKKKLVFEDETGAGDGPPEGSTSGAMSDDSEMRAAAGGAAVEGGQGADGVGNASGDWHCDSTWSEGHVTTTSTRTWVLPTYNNHLYKRLGESLQSNTYNGFSTPWGYFDFNRFHCHFSPRDWQRLINNNWGMRPKAMRVKIFNIQVKEVTTSNGETTVANNLTSTVQIFADSSYELPYVMDAGQEGSLPPFPNDVFMVPQYGYCGLVTGNTSQQQTDRNAFYCLEYFPSQMLRTGNNFEITYSFEKVPFHSMYAHSQSLDRLMNPLIDQYLWGLQSTTTGTTLNAGTATTNFTKLRPTNFSNFKKNWLPGPSIKQQGFSKTANQNYHIPATGSDSLIYYETHSTLDGRWSALTPGPPSATAGPADSKFSNSQLIFAGPKQNGNTATVPGTLIFTSEEELAATNATDTDMWGNLPRRDSSVSNLPTVDRYTDLGAVPGMVWQNRDIYYQGPIWAKIPHTDGHFHPSPLIGGFGLKHPPPQIFIKNTPVPANPATTFSSTPVNSFITQYSTGQVSVQIDWEIQKERSKRWNPEVQFTSNYGQQNSLLWAPDAAGKYTEPRAIGTRYLTHHL

SEQ ID NO: 1682 - protein, 735 aa, Artificial Sequence
  Description of Artificial Sequence: Synthetic polypeptide
MAADGYLPDWLEDNLSEGVREWWALQPGAPKPKANQQHQDNARGLVLPGYKYLGPGNGLDKGEPVNAADAAALEHDKAYDQQLKAGDNPYLKYNHADAEFQQRLQGDTSFGGNLGRAVFQAKKRVLEPLGLVEQAGETAPGKKRPLIESPQQPDSSTGIGKKGKQPAKKKLVFEDETGAGDGPPEGSTSGAMSDDSEMRAAAGGAAVEGGQGADGVGNASGDWHCDSTWSEGHVTTTSTRTWVLPTYNNHLYKRLGESLQSNTYNGFSTPWGYFDFNRFHCHFSPRDWQRLINNNWGMRPKAMRVKIFNIQVKEVTTSNGETTVANNLTSTVQIFADSSYELPYVMDAGQEGSLPPFPNDVFMVPQYGYCGLVTGNTSQQQTDRNAFYCLEYFPSQMLRTGNNFEITYSFEKVPFHSMYAHSQSLDRLMNPLIDQYLWGLQSTTTGTTLNAGTATTNFTKLRPTNFSNFKKNWLPGPSIKQQGFSKTANQNYSIPATGSDSLISYETHSTLDGRWSALTPGPPRATAGPADSKFSNSQLIFAGPKQNGNTATVPGTLIFTSEEELAATNATDTDMWGNLPRHDSSLSNLPTVDRNTGLGAVPGMVWQNRDIYYQGPIWAKIPHTDGHFHPSPLIGGFGLKHPPPQIFIKNTPVPANPATTFSSTPVNSFITQYSTGQVSVQIDWEIQKERSKRWNPEVQFTSNYGQQNSLLWAPDAAGKYTEPRAIGTRYLTHHL

SEQ ID NO: 1683 - protein, 735 aa, Artificial Sequence
  Description of Artificial Sequence: Synthetic polypeptide
MAADGYLPDWLEDNLSEGVREWWALQPGAPKPKANQQHQDNARGLVLPGYKYLGPGNGLDKGEPVNAADAAALEHDKAYDQQLKAGDNPYLKYNHADAEFQQRLQGDTSFGGNLGRAVFQAKKRVLEPLGLVEQAGETAPGKKRPLIESPQQPDSSTGIGKKGKQPAKKKLVFEDETGAGDGPPEGSTSGAMSDDSEMRAAAGGAAVEGGQGADGVGNASGDWHCDSTWSEGHVTTTSTRTWVLPTYNNHLYKRLGESLQSNTYNGFSTPWGYFDFNRFHCHFSPRDWQRLINNNWGMRPKAMRVKIFNIQVKEVTTSNGETTVANNLTSTVQIFADSSYELPYVMDAGQEGSLPPFPNDVFMVPQYGYCGLVTGNTSQQQTDRNAFYCLEYFPSQMLRTGNNFEITYSFEKVPFHSMYAHSQSLDRLMNPLIDQYLWGLQSTTTGTTLNAGTATTNFTKLRPTNFSNFKKNWLPGPSIKQQGFSKTANQNYFIPATGSDSLIRYETHSTLDGRWSALTPGPPLATAGPADSKFSNSQLIFAGPKQNGNTATVPGTLIFTSEEELAATNATDTDMWGNLPVIDFSKSNLPTVDRLTHLGAVPGMVWQNRDIYYQGPIWAKIPHTDGHFHPSPLIGGFGLKHPPPQIFIKNTPVPANPATTFSSTPVNSFITQYSTGQVSVQIDWEIQKERSKRWNPEVQFTSNYGQQNSLLWAPDAAGKYTEPRAIGTRYLTHHL

SEQ ID NO: 1684 - protein, 735 aa, Artificial Sequence
  Description of Artificial Sequence: Synthetic polypeptide
MAADGYLPDWLEDNLSEGVREWWALQPGAPKPKANQQHQDNARGLVLPGYKYLGPGNGLDKGEPVNAADAAALEHDKAYDQQLKAGDNPYLKYNHADAEFQQRLQGDTSFGGNLGRAVFQAKKRVLEPLGLVEQAGETAPGKKRPLIESPQQPDSSTGIGKKGKQPAKKKLVFEDETGAGDGPPEGSTSGAMSDDSEMRAAAGGAAVEGGQGADGVGNASGDWHCDSTWSEGHVTTTSTRTWVLPTYNNHLYKRLGESLQSNTYNGFSTPWGYFDFNRFHCHFSPRDWQRLINNNWGMRPKAMRVKIFNIQVKEVTTSNGETTVANNLTSTVQIFADSSYELPYVMDAGQEGSLPPFPNDVFMVPQYGYCGLVTGNTSQQQTDRNAFYCLEYFPSQMLRTGNNFEITYSFEKVPFHSMYAHSQSLDRLMNPLIDQYLWGLQSTTTGTTLNAGTATTNFTKLRPTNFSNFKKNWLPGPSIKQQGFSKTANQNYKIPATGSDSLIKYETHSTLDGRWSALTPGPPMATAGPADSKFSNSQLIFAGPKQNGNTATVPGTLIFTSEEELAATNATDTDMWGNLPVRDFSLSNLPTVDRTTKLGAVPGMVWQNRDIYYQGPIWAKIPHTDGHFHPSPLIGGFGLKHPPPQIFIKNTPVPANPATTFSSTPVNSFITQYSTGQVSVQIDWEIQKERSKRWNPEVQFTSNYGQQNSLLWAPDAAGKYTEPRAIGTRYLTHHL

SEQ ID NO: 1685 - protein, 735 aa, Artificial Sequence
  Description of Artificial Sequence: Synthetic polypeptide
MAADGYLPDWLEDNLSEGVREWWALQPGAPKPKANQQHQDNARGLVLPGYKYLGPGNGLDKGEPVNAADAAALEHDKAYDQQLKAGDNPYLKYNHADAEFQQRLQGDTSFGGNLGRAVFQAKKRVLEPLGLVEQAGETAPGKKRPLIESPQQPDSSTGIGKKGKQPAKKKLVFEDETGAGDGPPEGSTSGAMSDDSEMRAAAGGAAVEGGQGADGVGNASGDWHCDSTWSEGHVTTTSTRTWVLPTYNNHLYKRLGESLQSNTYNGFSTPWGYFDFNRFHCHFSPRDWQRLINNNWGMRPKAMRVKIFNIQVKEVTTSNGETTVANNLTSTVQIFADSSYELPYVMDAGQEGSLPPFPNDVFMVPQYGYCGLVTGNTSQQQTDRNAFYCLEYFPSQMLRTGNNFEITYSFEKVPFHSMYAHSQSLDRLMNPLIDQYLWGLQSTTTGTTLNAGTATTNFTKLRPTNFSNFKKNWLPGPSIKQQGFSKTANQNYFIPATGSDSLIQYETHSTLDGRWSALTPGPPMATAGPADSKFSNSQLIFAGPKQNGNTATVPGTLIFTSEEELAATNATDTDMWGNLPGGDQSNSNLPTVDRLTALGAVPGMVWQNRDIYYQGPIWAKIPHTDGHFHPSPLIGGFGLKHPPPQIFIKNTPVPANPATTFSSTPVNSFITQYSTGQVSVQIDWEIQKERSKRWNPEVQFTSNYGQQNSLLWAPDAAGKYTEPRAIGTRYLTHHL

SEQ ID NO: 1686 - protein, 735 aa, Artificial Sequence
  Description of Artificial Sequence: Synthetic polypeptide
MAADGYLPDWLEDNLSEGVREWWALQPGAPKPKANQQHQDNARGLVLPGYKYLGPGNGLDKGEPVNAADAAALEHDKAYDQQLKAGDNPYLKYNHADAEFQQRLQGDTSFGGNLGRAVFQAKKRVLEPLGLVEQAGETAPGKKRPLIESPQQPDSSTGIGKKGKQPAKKKLVFEDETGAGDGPPEGSTSGAMSDDSEMRAAAGGAAVEGGQGADGVGNASGDWHCDSTWSEGHVTTTSTRTWVLPTYNNHLYKRLGESLQSNTYNGFSTPWGYFDFNRFHCHFSPRDWQRLINNNWGMRPKAMRVKIFNIQVKEVTTSNGETTVANNLTSTVQIFADSSYELPYVMDAGQEGSLPPFPNDVFMVPQYGYCGLVTGNTSQQQTDRNAFYCLEYFPSQMLRTGNNFEITYSFEKVPFHSMYAHSQSLDRLMNPLIDQYLWGLQSTTTGTTLNAGTATTNFTKLRPTNFSNFKKNWLPGPSIKQQGFSKTANQNYEMPATGSDSLIIYETHSTLDGRWSALTPGPPFATAGPADSKFSNSQLIFAGPKQNGNTATVPGTLIFTSEEELAATNATDTDVWGNLPSGDHSQSNLPTVDRPTMLGAVPGMVWQNRDIYYQGPIWAKIPHTDGHFHPSPLIGGFGLKHPPPQIFIKNTPVPANPATTFISTPVNSFITQYSTGQVSVHIDWEIQKERSKRWNPEVQFTSDYGQHSSLLWAPDAAGKYTEPTAIGTRYLTHHL

SEQ ID NO: 1687 - protein, 734 aa, Artificial Sequence
  Description of Artificial Sequence: Synthetic polypeptide
MAADGYLPDWLEDNLSEGVREWWALQPGAPKPKANQQHQDNARGLVLPGYKYLGPGNGLDKGEPVNAADAAALEHDKAYDQQLKAGDNPYLKYNHADAEFQQRLQGDTSFGGNLGRAVFQAKKRVLEPLGLVEQAGETAPGKKRPLIESPQQPDSSTGIGKKGKQPAKKKLVFEDETGAGDGPPEGSTSGAMSDDSEMRAAAGGAAVEGGQGADGVGNASGDWHCDSTWSEGHVTTTSTRTWVLPTYNNHLYKRLGESLQSNTYNGFSTPWGYFDFNRFHCHFSPRDWQRLINNNWGMRPKAMRVKIFNIQVKEVTTSNGETTVANNLTSTVQIFADSSYELPYVMDAGQEGSLPPFPNDVFMVPQYGYCGLVTGNTSQQQTDRNAFYCLEYFPSQMLRTGNNFEITYSFEKVPFHSMYAHSQSLDRLMNPLIDQYLWGLQSTTTGTTLNAGTATTNFTKLRPTNFSNFKKNWLPGPSIKQQGFSKTANQNDIPATGSDSLIKYETHSTLDGRWSALTPGPPMATAGPADSKFSNSQLIFAGPKQNGNTATVPGTLIFTSEEELAATNATDTDMWGNLPGGDQSNSNLPTVDRLTALGAVPGMVWQNRDIYYQGPIWAKIPHTDGHFHPSPLIGGFGLKHPPPQIFIKNTPVPANPATTFSSTPVNSFITQYSTGQVSVQIDWEIQKERSKRWNPEVQFTSNYGQQNSLLWAPDAAGKYTEPRAIGTRYLTHHL

SEQ ID NO: 1688 - protein, 735 aa, Artificial Sequence
  Description of Artificial Sequence: Synthetic polypeptide
MAADGYLPDWLEDNLSEGVREWWALQPGAPKPKANQQHQDNARGLVLPGYKYLGPGNGLDKGEPVNAADAAALEHDKAYDQQLKAGDNPYLKYNHADAEFQQRLQGDTSFGGNLGRAVFQAKKRVLEPLGLVEQAGETAPGKKRPLIESPQQPDSSTGIGKKGKQPAKKKLVFEDETGAGDGPPEGSTSGAMSDDSEMRAAAGGAAVEGGQGADGVGNASGDWHCDSTWSEGHVTTTSTRTWVLPTYNNHLYKRLGESLQSNTYNGFSTPWGYFDFNRFHCHFSPRDWQRLINNNWGMRPKAMRVKIFNIQVKEVTTSNGETTVANNLTSTVQIFADSSYELPYVMDAGQEGSLPPFPNDVFMVPQYGYCGLVTGNTSQQQTDRNAFYCLEYFPSQMLRTGNNFEITYSFEKVPFHSMYAHSQSLDRLMNPLIDQYLWGLQSTTTGTTLNAGTATTNFTKLRPTNFSNFKKNWLPGPSIKQQGFSKTANQNYIIPATGSDSLITYETHSTLDGRWSALTPGPPVATAGPADSKFSNSQLIFAGPKQNGNTATVPGTLIFTSEEELAATNATDTDMWGNLPFNDDSSSNLPTVDRSTFLGAVPGMVWQNRDIYYQGPIWAKIPHTDGHFHPSPLIGGFGLKHPPPQIFIKNTPVPANPATTFSSTPVNSFITQYSTGQVSVQIDWEIQKERSKRWNPEVQFTSNYGQQNSLLWAPDAAGKYTEPRAIGTRYLTHHL

SEQ ID NO: 1689 - protein, 733 aa, Artificial Sequence
  Description of Artificial Sequence: Synthetic polypeptide
MAADGYLPDWLEDNLSEGIREWWDLKPGAPKPKANQQKQDDGRGLVLPGYKYLGPFNGLDKGEPVNAADAAALEHDKAYDQQLKAGDNPYLRYNHADAEFQERLQEDTSFGGNLGRAVFQAKKRVLEPLGLVEEGAKTAPGKKRPLESPQEPDSSSGIGKKGKQPARKRLNFEEDTGAGDGPPEGSDTSAMSSDIEMRAAPGGNAVDAGQGSDGVGNASGDWHCDSTWSEGKVTTTSTRTWVLPTYNNHLYLRLGTTSSSNTYNGFSTPWGYFDFNRFHCHFSPRDWQRLINNNWGLRPKAMRVKIFNIQVKEVTTSNGETTVANNLTSTVQIFADSSYELPYVMDAGQEGSLPPFPNDVFMVPQYGYCGIVTGENQNQTDRNAFYCLEYFPSQMLRTGNNFEMAYNFEKVPFHSMYAHSQSLDRLMNPLLDQYLWHLQSTTSGETLNQGNAATTFGKIRSGDFAFYRKNWLPGPCVKQQRFSKTASQNYKIPASGGNALLKYDTHYTLNNRWSNIAPGPPMATAGPSDGDFSNAQLIFPGPSVTGNTTTSANNLLFTSEEEIAATNPRDTDMFGQIADNNQNATTAPITGNVTAMGVLPGMVWQNRDIYYQGPIWAKIPHADGHFHPSPLIGGFGLKHPPPQIFIKNTPVPANPATTFTAARVDSFITQYSTGQVAVQIEWEIEKERSKRWNPEVQFTSNYGNQSSMLWAPDTTGKYTEPRVIGSRYLTNHL

SEQ ID NO: 1690 - protein, 742 aa, Artificial Sequence; identical to SEQ ID NO: 1501
  Description of Artificial Sequence: Synthetic polypeptide

SEQ ID NO: 1691 - protein, 733 aa, Artificial Sequence; identical to SEQ ID NO: 421
  Description of Artificial Sequence: Synthetic polypeptide

SEQ ID NO: 1692 - protein, 733 aa, Artificial Sequence; identical to SEQ ID NO: 138
  Description of Artificial Sequence: Synthetic polypeptide

SEQ ID NO: 1693 - protein, 733 aa, Artificial Sequence; identical to SEQ ID NO: 425
  Description of Artificial Sequence: Synthetic polypeptide

SEQ ID NO: 1694 - protein, 735 aa, Artificial Sequence
  Description of Artificial Sequence: Synthetic polypeptide
MAADGYLPDWLEDNLSEGVREWWALQPGAPKPKANQQHQDNARGLVLPGYKYLGPGNGLDKGEPVNAADAAALEHDKAYDQQLKAGDNPYLKYNHADAEFQQRLQGDTSFGGNLGRAVFQAKKRVLEPLGLVEQAGETAPGKKRPLIESPQQPDSSTGIGKKGKQPAKKKLVFEDETGAGDGPPEGSTSGAMSDDSEMRAAAGGAAVEGGQGADGVGNASGDWHCDSTWSEGHVTTTSTRTWVLPTYNNHLYKRLGESLQSNTYNGFSTPWGYFDFNRFHCHFSPRDWQRLINNNWGMRPKAMRVKIFNIQVKEVTTSNGETTVANNLTSTVQIFADSSYELPYVMDAGQEGSLPPFPNDVFMVPQYGYCGLVTGNTSQQQTDRNAFYCLEYFPSQMLRTGNNFEITYSFEKVPFHSMYAHSQSLDRLMNPLIDQYLWGLQSTTTGTTLNAGTATTNFTKLRPTNFSNFKKNWLPGPSIKQQGFSKTANQNYEIPATGSDSLIEYETHSTLDGRWSALTPGPPMATAGPADSKFSNSQLIFAGPKQNGNTATVPGTLIFTSEEELAATNATDTDMWGNLPGGDQSSSNLPTVDRLTALGAVPGMVWQNRDIYYQGPIWAKIPHTDGHFHPSPLIGGFGLKHPPPQIFIKNTPVPANPATTFSSTPVNSFITQYSTGQVSVQIDWEIQKERSKRWNPEVQFTSNYGQQNSLLWAPDAAGKYTEPRAIGTRYLTHHL

SEQ ID NO: 1695 - protein, 735 aa, Artificial Sequence
  Description of Artificial Sequence: Synthetic polypeptide
MAADGYLPDWLEDNLSEGVREWWALQPGAPKPKANQQHQDNARGLVLPGYKYLGPGNGLDKGEPVNAADAAALEHDKAYDQQLKAGDNPYLKYNHADAEFQQRLQGDTSFGGNLGRAVFQAKKRVLEPLGLVEQAGETAPGKKRPLIESPQQPDSSTGIGKKGKQPAKKKLVFEDETGAGDGPPEGSTSGAMSDDSEMRAAAGGAAVEGGQGADGVGNASGDWHCDSTWSEGHVTTTSTRTWVLPTYNNHLYKRLGESLQSNTYNGFSTPWGYFDFNRFHCHFSPRDWQRLINNNWGMRPKAMRVKIFNIQVKEVTTSNGETTVANNLTSTVQIFADSSYELPYVMDAGQEGSLPPFPNDVFMVPQYGYCGLVTGNTSQQQTDRNAFYCLEYFPSQMLRTGNNFEITYSFEKVPFHSMYAHSQSLDRLMNPLIDQYLWGLQSTTTGTTLNAGTATTNFTKLRPTNFSNFKKNWLPGPSIKQQGFSKTANQNYEIPATGSDSLIEYETHSTLDGRWSALTPGPPMATAGPADSKFSNSQLIFAGPKQNGNTATVPGTLIFTSEEELAATNATDTDMWGNLPGGDQSSSNLPVVRGLRALGAVPGMVWQNRDIYYQGPIWAKIPHTDGHFHPSPLIGGFGLKHPPPQIFIKNTPVPANPATTFSSTPVNSFITQYSTGQVSVQIDWEIQKERSKRWNPEVQFTSNYGQQNSLLWAPDAAGKYTEPRAIGTRYLTHHL

SEQ ID NO: 1696 - protein, 735 aa, Artificial Sequence
  Description of Artificial Sequence: Synthetic polypeptide
MAADGYLPDWLEDNLSEGVREWWALQPGAPKPKANQQHQDNARGLVLPGYKYLGPGNGLDKGEPVNAADAAALEHDKAYDQQLKAGDNPYLKYNHADAEFQQRLQGDTSFGGNLGRAVFQAKKRVLEPLGLVEQAGETAPGKKRPLIESPQQPDSSTGIGKKGKQPAKKKLVFEDETGAGDGPPEGSTSGAMSDDSEMRAAAGGAAVEGGQGADGVGNASGDWHCDSTWSEGHVTTTSTRTWVLPTYNNHLYKRLGESLQSNTYNGFSTPWGYFDFNRFHCHFSPRDWQRLINNNWGMRPKAMRVKIFNIQVKEVTTSNGETTVANNLTSTVQIFADSSYELPYVMDAGQEGSLPPFPNDVFMVPQYGYCGLVTGNTSQQQTDRNAFYCLEYFPSQMLRTGNNFEITYSFEKVPFHSMYAHSQSLDRLMNPLIDQYLWGLQSTTTGTTLNAGTATTNFTKLRPTNFSNFKKNWLPGPSIKQQGFSKTANQNYEIPATGSDSLIEYETHSTLDGRWSALTPGPPMATAGPADSKFSNSQLIFAGPKQNGNTATVPGTLIFTSEEELAATNATDTDMWGNLPGGDQSSSNLPVVNRLSALGAVPGMVWQNRDIYYQGPIWAKIPHTDGHFHPSPLIGGFGLKHPPPQIFIKNTPVPANPATTFSSTPVNSFITQYSTGQVSVQIDWEIQKERSKRWNPEVQFTSNYGQQNSLLWAPDAAGKYTEPRAIGTRYLTHHL

SEQ ID NO: 1697 - protein, 735 aa, Artificial Sequence
  Description of Artificial Sequence: Synthetic polypeptide
MAADGYLPDWLEDNLSEGVREWWALQPGAPKPKANQQHQDNARGLVLPGYKYLGPGNGLDKGEPVNAADAAALEHDKAYDQQLKAGDNPYLKYNHADAEFQQRLQGDTSFGGNLGRAVFQAKKRVLEPLGLVEQAGETAPGKKRPLIESPQQPDSSTGIGKKGKQPAKKKLVFEDETGAGDGPPEGSTSGAMSDDSEMRAAAGGAAVEGGQGADGVGNASGDWHCDSTWSEGHVTTTSTRTWVLPTYNNHLYKRLGESLQSNTYNGFSTPWGYFDFNRFHCHFSPRDWQRLINNNWGMRPKAMRVKIFNIQVKEVTTSNGETTVANNLTSTVQIFADSSYELPYVMDAGQEGSLPPFPNDVFMVPQYGYCGLVTGNTSQQQTDRNAFYCLEYFPSQMLRTGNNFEITYSFEKVPFHSMYAHSQSLDRLMNPLIDQYLWGLQSTTTGTTLNAGTATTNFTKLRPTNFSNFKKNWLPGPSIKQQGFSKTANQNYEIPATGSDSLIEYETHSTLDGRWSALTPGPPMATAGPADSKFSNSQLIFAGPKQNGNTATVPGTLIFTSEEELAATNATDTDMWGNLPGGDQSSSNLPPVMGLGALGAVPGMVWQNRDIYYQGPIWAKIPHTDGHFHPSPLIGGFGLKHPPPQIFIKNTPVPANPATTFSSTPVNSFITQYSTGQVSVQIDWEIQKERSKRWNPEVQFTSNYGQQNSLLWAPDAAGKYTEPRAIGTRYLTHHL

SEQ ID NO: 1698 - protein, 736 aa, Artificial Sequence
  Description of Artificial Sequence: Synthetic polypeptide
MAADGYLPDWLEDNLSEGVREWWALQPGAPKPKANQQHQDNARGLVLPGYKYLGPGNGLDKGEPVNAADAAALEHDKAYDQQLKAGDNPYLKYNHADAEFQQRLQGDTSFGGNLGRAVFQAKKRVLEPLGLVEQAGETAPGKKRPLIESPQQPDSSTGIGKKGKQPAKKKLVFEDETGAGDGPPEGSTSGAMSDDSEMRAAAGGAAVEGGQGADGVGNASGDWHCDSTWSEGHVTTTSTRTWVLPTYNNHLYKRLGESLQSNTYNGFSTPWGYFDFNRFHCHFSPRDWQRLINNNWGMRPKAMRVKIFNIQVKEVTTSNGETTVANNLTSTVQIFADSSYELPYVMDAGQEGSLPPFPNDVFMVPQYGYCGLVTGNTSQQQTDRNAFYCLEYFPSQMLRTGNNFEITYSFEKVPFHSMYAHSQSLDRLMNPLIDQYLWGLQSTTTGTTLNAGTATTNFTKLRPTNFSNFKKNWLPGPSIKQQGFSKTANQNYEIPATGSDSLIEYETHSTLDGRWSALTPGPPMATAGPADSKFSNSQLIFAGPKQNGNTATVPGTLIFTSEEELAATNATDTDMWGNLPGGDQSRVDRLPTVDRLTALGAVPGMVWQNRDIYYQGPIWAKIPHTDGHFHPSPLIGGFGLKHPPPQIFIKNTPVPANPATTFSSTPVNSFITQYSTGQVSVQIDWEIQKERSKRWNPEVQFTSNYGQQNSLLWAPDAAGKYTEPRAIGTRYLTHHL

SEQ ID NO: 1699 - protein, 736 aa, Artificial Sequence
  Description of Artificial Sequence: Synthetic polypeptide
MAADGYLPDWLEDNLSEGVREWWALQPGAPKPKANQQHQDNARGLVLPGYKYLGPGNGLDKGEPVNAADAAALEHDKAYDQQLKAGDNPYLKYNHADAEFQQRLQGDTSFGGNLGRAVFQAKKRVLEPLGLVEQAGETAPGKKRPLIESPQQPDSSTGIGKKGKQPAKKKLVFEDETGAGDGPPEGSTSGAMSDDSEMRAAAGGAAVEGGQGADGVGNASGDWHCDSTWSEGHVTTTSTRTWVLPTYNNHLYKRLGESLQSNTYNGFSTPWGYFDFNRFHCHFSPRDWQRLINNNWGMRPKAMRVKIFNIQVKEVTTSNGETTVANNLTSTVQIFADSSYELPYVMDAGQEGSLPPFPNDVFMVPQYGYCGLVTGNTSQQQTDRNAFYCLEYFPSQMLRTGNNFEITYSFEKVPFHSMYAHSQSLDRLMNPLIDQYLWGLQSTTTGTTLNAGTATTNFTKLRPTNFSNFKKNWLPGPSIKQQGFSKTANQNYEIPATGSDSLIEYETHSTLDGRWSALTPGPPMATAGPADSKFSNSQLIFAGPKQNGNTATVPGTLIFTSEEELAATNATDTDMWGNLPGGDQSRALRLPTVDRLTALGAVPGMVWQNRDIYYQGPIWAKIPHTDGHFHPSPLIGGFGLKHPPPQIFIKNTPVPANPATTFSSTPVNSFITQYSTGQVSVQIDWEIQKERSKRWNPEVQFTSNYGQQNSLLWAPDAAGKYTEPRAIGTRYLTHHL

SEQ ID NO: 1700 - DNA, 1172 bp, Artificial Sequence
  Description of Artificial Sequence: Synthetic polynucleotide
cttaattaggctgcgcgctcgctcgctcactgaggccgcccgggcaaagcccgggcgtcgggcgacctttggtcgcccggcctcagtgagcgagcgagcgcgcagagagggagtggccaactccatcactaggggttccttgtagttaatgattaacccgccatgctacttatctaccagggtaatggggatcctctagaactatagctagtcgacattgattattgactagttattaatagtaatcaattacggggtcattagttcatagcccatatatggagttccgcgttacataacttacggtaaatggcccgcctggctgaccgcccaacgacccccgcccattgacgtcaataatgacgtatgttcccatagtaacgccaatagggactttccattgacgtcaatgggtggactatttacggtaaactgcccacttggcagtacatcaagtgtatcatatgccaagtacgccccctattgacgtcaatgacggtaaatggcccgcctggcattatgcccagtacatgaccttatgggactttcctacttggcagtacatctacgtattagtcatcgctattaccatgtcgaggccacgttctgcttcactctccccatctcccccccctccccacccccaattttgtatttatttattttttaattattttgtgcagcgatgggggcggggggggggggcgcgcgccaggcggggcggggcggggcgaggggcggggcggggcgaggcggagaggtgcggcggcagccaatcagagcggcgcgctccgaaagtttccttttatggcgaggcggcggcggcggcggccctataaaaagcgaagcgcgcggcgggcgggagcaagctttattgcggtagtttatcacagttaaattgctaacgcagtcagtgcttctgacacaacagtctcgaacttaagctgcagaagttggtcgtgaggcactgggcaggtaagtatcaaggttacaagacaggtttaaggagaccaatagaaactgggcttgtcgagacagagaagactcttgcgtttctgataggcacctattggtcttactgacatccactttgcctttctctccacaggtgtccactcccagttcaattacagctcttaaggctagagtacttaatacgactcsactatagg

SEQ ID NO: 1701 - DNA, 3231 bp, Artificial Sequence
  Description of Artificial Sequence: Synthetic polynucleotide
taagaattcacgcgtggtacctctagagtcgacccgggcggcctcgaggacggggtgaactacgcctgaggatccgatctttttccctctgccaaaaattatggggacatcatgaagccccttgagcatctgacttctggctaataaaggaaatttattttcattgcaatagtgtgttggaattttttgtgtctctcactcggaagcaattcgttgatctgaatttcgaccacccataatacccattaccctggtagataagtagcatggcgggttaatcattaactacaaggaacccctagtgatggagttggccactccctctctgcgcgctcgctcgctcactgaggccgggcgaccaaaggtcgcccgacgcccgggctttgcccgggcggcctcagtgagcgagcgagcgcgcagccttaattaacctaattcactggccgtcgttttacaacgtcgtgactgggaaaaccctggcgttacccaacttaatcgccttgcagcacatccccctttcgccagctggcgtaatagcgaagaggcccgcaccgatcgcccttcccaacagttgcgcagcctgaatggcgaatgggacgcgccctgtagcggcgcattaagcgcggcgggtgtggtggttacgcgcagcgtgaccgctacacttgccagcgccctagcgcccgctcctttcgctttcttcccttcctttctcgccacgttcgccggctttccccgtcaagctctaaatcgggggctccctttagggttccgatttagtgctttacggcacctcgaccccaaaaaacttgattagggtgatggttcacgtagtgggccatcgccctgatagacggtttttcgccctttgacgttggagtccacgttctttaatagtggactcttgttccaaactggaacaacactcaaccctatctcggtctattcttttgatttataagggattttgccgatttcggcctattggttaaaaaatgagctgatttaacaaaaatttaacgcgaattttaacaaaatattaacgcttacaatttaggtggcacttttcggggaaatgtgcgcggaacccctatttgtttatttttctaaatacattcaaatatgtatccgctcatgagacaataaccctgataaatgcttcaataatattgaaaaaggaagagtatgagtattcaacatttccgtgtcgcccttattcccttttttgcggcattttgccttcctgtttttgctcacccagaaacgctggtgaaagtaaaagatgctgaagatcagttgggtgcacgagtgggttacatcgaactggatctcaacagcggtaagatccttgagagttttcgccccgaagaacgttttccaatgatgagcacttttaaagttctgctatgtggcgcggtattatcccgtattgacgccgggcaagagcaactcggtcgccgcatacactattctcagaatgacttggttgagtactcaccagtcacagaaaagcatcttacggatggcatgacagtaagagaattatgcagtgctgccataaccatgagtgataacactgcggccaacttacttctgacaacgatcggaggaccgaaggagctaaccgcttttttgcacaacatgggggatcatgtaactcgccttgatcgttgggaaccggagctgaatgaagccataccaaacgacgagcgtgacaccacgatgcctgtagcaatggcaacaacgttgcgcaaactattaactggcgaactacttactctagcttcccggcaacaattaatagactggatggaggcggataaagttgcaggaccacttctgcgctcggcccttccggctggctggtttattgctgataaatctggagccggtgagcgtgggtctcgcggtatcattgcagcactggggccagatggtaagccctcccgtatcgtagttatctacacgacggggagtcaggcaactatggatgaacgaaatagacagatcgctgagataggtgcctcactgattaagcattggtaactgtcagaccaagtttactcatatatactttagattgatttaaaacttcatttttaatttaaaaggatctaggtgaagatcctttttgataatctcatgaccaaaatcccttaacgtgagttttcgttccactgagcgtcagaccccgtagaaaagatcaaaggatcttcttgagatcctttttttctgcgcgtaatctgctgcttgcaaacaaaaaaaccaccgctaccagcggtggtttgtttgccggatcaagagctaccaactctttttccgaaggtaactggcttcagcagagcgcagataccaaatactgttcttctagtgtagccgtagttaggccaccacttcaagaactctgtagcaccgcctacatacctcgctctgctaatcctgttaccagtggctgctgccagtggcgataagtcgtgtcttaccgggttggactcaagacgatagttaccggataaggcgcagcggtcgggctgaacggggggttcgtgcacacagcccagcttggagcgaacgacctacaccgaactgagatacctacagcgtgagctatgagaaagcgccacgcttcccgaagggagaaaggcggacaggtatccggtaagcggcagggtcggaacaggagagcgcacgagggagcttccagggggaaacgcctggtatctttatagtcctgtcgggtttcgccacctctgacttgagcgtcgatttttgtgatgctcgtcaggggggcggagcctatggaaaaacgccagcaacgcggcctttttacggttcctggccttttgctggccttttgctcacatgttctttcctgcgttatcccctgattctgtggataaccgtattaccgcctttgagtgagctgataccgctcgccgcagccgaacgaccgagcgcagcgagtcagtgagcgaggaagcggaagagcgcccaatacgcaaaccgcctctccccgcgcgttggccgattcattaatgcagctggcacgacaggtttcccgactggaaagcgggcagtgagcgcaacgcaattaatgtgagttagctcactcattaggcaccccaggctttacactttatgcttccggctcgtatgttgtgtggaattgtgagcggataacaatttcacacaggaaacagctatgaccatgattacgccagatttaattaaggc

SEQ ID NO: 1702 - protein, 737 aa, Artificial Sequence
  Description of Artificial Sequence: Synthetic polypeptide
  misc_feature (264)..(264): Xaa can be any naturally occurring amino acid
  misc_feature (266)..(266): Xaa can be any naturally occurring amino acid
  misc_feature (268)..(268): Xaa can be any naturally occurring amino acid
  misc_feature (448)..(448): Xaa can be any naturally occurring amino acid
  misc_feature (459)..(460): Xaa can be any naturally occurring amino acid
  misc_feature (467)..(467): Xaa can be any naturally occurring amino acid
  misc_feature (470)..(471): Xaa can be any naturally occurring amino acid
  misc_feature (474)..(474): Xaa can be any naturally occurring amino acid
  misc_feature (495)..(495): Xaa can be any naturally occurring amino acid
  misc_feature (516)..(516): Xaa can be any naturally occurring amino acid
  misc_feature (533)..(533): Xaa can be any naturally occurring amino acid
  misc_feature (547)..(547): Xaa can be any naturally occurring amino acid
  misc_feature (551)..(551): Xaa can be any naturally occurring amino acid
  misc_feature (555)..(555): Xaa can be any naturally occurring amino acid
  misc_feature (557)..(557): Xaa can be any naturally occurring amino acid
  misc_feature (561)..(561): Xaa can be any naturally occurring amino acid
  misc_feature (563)..(563): Xaa can be any naturally occurring amino acid
  misc_feature (577)..(577): Xaa can be any naturally occurring amino acid
  misc_feature (583)..(583): Xaa can be any naturally occurring amino acid
  misc_feature (593)..(593): Xaa can be any naturally occurring amino acid
  misc_feature (596)..(596): Xaa can be any naturally occurring amino acid
  misc_feature (661)..(662): Xaa can be any naturally occurring amino acid
  misc_feature (664)..(665): Xaa can be any naturally occurring amino acid
  misc_feature (710)..(710): Xaa can be any naturally occurring amino acid
  misc_feature (717)..(719): Xaa can be any naturally occurring amino acid
  misc_feature (723)..(723): Xaa can be any naturally occurring amino acid
MAADGYLPDWLEDNLSEGIREWWDLKPGAPKPKANQQKQDDGRGLVLPGYKYLGPFNGLDKGEPVNAADAAALEHDKAYDQQLKAGDNPYLRYNHADAEFQERLQEDTSFGGNLGRAVFQAKKRVLEPLGLVEEGAKTAPGKKRPVEPSPQRSPDSSTGIGKKGQQPAKKRLNFGQTGDSESVPDPQPLGEPPAGPSGLGSGTMAAGGGAPMADNNEGADGVGNASGNWHCDSTWLGDRVITTSTRTWALPTYNNHLYKQISSXSXGXTNDNHYFGYSTPWGYFDFNRFHCHFSPRDWQRLINNNWGFRPKRLNFKLFNIQVKEVTTNDGVTTIANNLTSTVQVFSDSEYQLPYVLGSAHQGCLPPFPADVFMIPQYGYLTLNNGSQAVGRSSFYCLEYFPSQMLRTGNNFTFSYTFEDVPFHSSYAHSQSLDRLMNPLIDQYLYYLXRTQSTGGTAGXXELLFSQXGPXXMSXQAKNWLPGPCYRQQRVSKTLXQNNNSNFAWTGATKYHLNGRXSLVNPGVAMATHKDDEXRFFPSSGVLIFGKXGAGXNNTXLXNVMXTXEEEIKTTNPVATEXYGVVAXNLQSSNTAPXTGXVNSQGALPGMVWQNRDVYLQGPIWAKIPHTDGNFHPSPLMGGFGLKHPPPQILIKNTPVPANPPXXFXXAKFASFITQYSTGQVSVEIEWELQKENSKRWNPEIQYTSNYAKSXNVDFAVXXXGVYXEPRPIGTRYLTRNL

SEQ ID NO: 1703 - protein, 737 aa, Artificial Sequence
  Description of Artificial Sequence: Synthetic polypeptide
MAADGYLPDWLEDNLSEGIREWWDLKPGAPKPKANQQKQDDGRGLVLPGYKYLGPFNGLDKGEPVNAADAAALEHDKAYDQQLKAGDNPYLRYNHADAEFQERLQEDTSFGGNLGRAVFQAKKRVLEPLGLVEEGAKTAPGKKRPVEPSPQRSPDSSTGIGKKGQQPAKKRLNFGQTGDSESVPDPQPLGEPPAGPSGLGSGTMAAGGGAPMADNNEGADGVGNASGNWHCDSTWLGDRVITTSTRTWALPTYNNHLYKQISSASSGSTNDNHYFGYSTPWGYFDFNRFHCHFSPRDWQRLINNNWGFRPKRLNFKLFNIQVKEVTTNDGVTTIANNLTSTVQVFSDSEYQLPYVLGSAHQGCLPPFPADVFMIPQYGYLTLNNGSQAVGRSSFYCLEYFPSQMLRTGNNFTFSYTFEDVPFHSSYAHSQSLDRLMNPLIDQYLYYLARTQSTGGTAGNRELLFSQGGPSNMSAQAKNWLPGPCYRQQRVSKTLAQNNNSNFAWTGATKYHLNGRDSLVNPGVAMATHKDDEDRFFPSSGVLIFGKEGAGANNTALENVMLTNEEEIKTTNPVATEQYGVVASNLQSSNTAPATGAVNSQGALPGMVWQNRDVYLQGPIWAKIPHTDGNFHPSPLMGGFGLKHPPPQILIKNTPVPANPPATFTPAKFASFITQYSTGQVSVEIEWELQKENSKRWNPEIQYTSNYAKSTNVDFAVNNEGVYSEPRPIGTRYLTRNL

SEQ ID NO: 1704 - protein, 737 aa, Artificial Sequence
  Description of Artificial Sequence: Synthetic polypeptide
MAADGYLPDWLEDNLSEGIREWWDLKPGAPKPKANQQKQDDGRGLVLPGYKYLGPFNGLDKGEPVNAADAAALEHDKAYDQQLKAGDNPYLRYNHADAEFQERLQEDTSFGGNLGRAVFQAKKRVLEPLGLVEEGAKTAPGKKRPVEPSPQRSPDSSTGIGKKGQQPAKKRLNFGQTGDSESVPDPQPLGEPPAGPSGLGSGTMAAGGGAPMADNNEGADGVGNASGNWHCDSTWLGDRVITTSTRTWALPTYNNHLYKQISSQSSGSTNDNHYFGYSTPWGYFDFNRFHCHFSPRDWQRLINNNWGFRPKRLNFKLFNIQVKEVTTNDGVTTIANNLTSTVQVFSDSEYQLPYVLGSAHQGCLPPFPADVFMIPQYGYLTLNNGSQAVGRSSFYCLEYFPSQMLRTGNNFTFSYTFEDVPFHSSYAHSQSLDRLMNPLIDQYLYYLSRTQSTGGTAGNRELLFSQGGPANMSAQAKNWLPGPCYRQQRVSKTLSQNNNSNFAWTGATKYHLNGRDSLVNPGVAMATHKDDEERFFPSSGVLIFGKQGAGANNTTLDNVMMTSEEEIKTTNPVATEQYGVVASNLQSSNTAPQTGTVNSQGALPGMVWQNRDVYLQGPIWAKIPHTDGNFHPSPLMGGFGLKHPPPQILIKNTPVPANPPAVFSPAKFASFITQYSTGQVSVEIEWELQKENSKRWNPEIQYTSNYAKSTNVDFAVNSEGVYSEPRPIGTRYLTRNL

SEQ ID NO: 1705 - protein, 737 aa, Artificial Sequence
  Description of Artificial Sequence: Synthetic polypeptide
MAADGYLPDWLEDNLSEGIREWWDLKPGAPKPKANQQKQDDGRGLVLPGYKYLGPFNGLDKGEPVNAADAAALEHDKAYDQQLKAGDNPYLRYNHADAEFQERLQEDTSFGGNLGRAVFQAKKRVLEPLGLVEEGAKTAPGKKRPVEPSPQRSPDSSTGIGKKGQQPAKKRLNFGQTGDSESVPDPQPLGEPPAGPSGLGSGTMAAGGGAPMADNNEGADGVGNASGNWHCDSTWLGDRVITTSTRTWALPTYNNHLYKQISSASSGSTNDNHYFGYSTPWGYFDFNRFHCHFSPRDWQRLINNNWGFRPKRLNFKLFNIQVKEVTTNDGVTTIANNLTSTVQVFSDSEYQLPYVLGSAHQGCLPPFPADVFMIPQYGYLTLNNGSQAVGRSSFYCLEYFPSQMLRTGNNFTFSYTFEDVPFHSSYAHSQSLDRLMNPLIDQYLYYLARTQSTGGTAGTRELLFSQGGPSNMSAQAKNWLPGPCYRQQRVSKTLTQNNNSNFAWTGATKYHLNGRDSLVNPGVAMATHKDDEDRFFPSSGVLIFGKQGAGANNTALDNVMITNEEEIKTTNPVATEQYGVVASNLQSSNTAPATGTVNSQGALPGMVWQNRDVYLQGPIWAKIPHTDGNFHPSPLMGGFGLKHPPPQILIKNTPVPANPPTVFSPAKFASFITQYSTGQVSVEIEWELQKENSKRWNPEIQYTSNYAKSTNVDFAVNSEGVYTEPRPIGTRYLTRNL

SEQ ID NO: 1706 - protein, 737 aa, Artificial Sequence
  Description of Artificial Sequence: Synthetic polypeptide
  misc_feature (264)..(264): Xaa can be any naturally occurring amino acid
  misc_feature (448)..(448): Xaa can be any naturally occurring amino acid
  misc_feature (459)..(459): Xaa can be any naturally occurring amino acid
  misc_feature (470)..(470): Xaa can be any naturally occurring amino acid
  misc_feature (495)..(495): Xaa can be any naturally occurring amino acid
  misc_feature (533)..(533): Xaa can be any naturally occurring amino acid
  misc_feature (547)..(547): Xaa can be any naturally occurring amino acid
  misc_feature (555)..(555): Xaa can be any naturally occurring amino acid
  misc_feature (557)..(557): Xaa can be any naturally occurring amino acid
  misc_feature (561)..(561): Xaa can be any naturally occurring amino acid
  misc_feature (563)..(563): Xaa can be any naturally occurring amino acid
  misc_feature (593)..(593): Xaa can be any naturally occurring amino acid
  misc_feature (596)..(596): Xaa can be any naturally occurring amino acid
  misc_feature (661)..(662): Xaa can be any naturally occurring amino acid
  misc_feature (664)..(664): Xaa can be any naturally occurring amino acid
  misc_feature (718)..(718): Xaa can be any naturally occurring amino acid
  misc_feature (723)..(723): Xaa can be any naturally occurring amino acid
MAADGYLPDWLEDNLSEGIREWWDLKPGAPKPKANQQKQDDGRGLVLPGYKYLGPFNGLDKGEPVNAADAAALEHDKAYDQQLKAGDNPYLRYNHADAEFQERLQEDTSFGGNLGRAVFQAKKRVLEPLGLVEEGAKTAPGKKRPVEPSPQRSPDSSTGIGKKGQQPAKKRLNFGQTGDSESVPDPQPLGEPPAGPSGLGSGTMAAGGGAPMADNNEGADGVGNASGNWHCDSTWLGDRVITTSTRTWALPTYNNHLYKQISSXSSGSTNDNHYFGYSTPWGYFDFNRFHCHFSPRDWQRLINNNWGFRPKRLNFKLFNIQVKEVTTNDGVTTIANNLTSTVQVFSDSEYQLPYVLGSAHQGCLPPFPADVFMIPQYGYLTLNNGSQAVGRSSFYCLEYFPSQMLRTGNNFTFSYTFEDVPFHSSYAHSQSLDRLMNPLIDQYLYYLXRTQSTGGTAGXRELLFSQGGPXNMSAQAKNWLPGPCYRQQRVSKTLXQNNNSNFAWTGATKYHLNGRDSLVNPGVAMATHKDDEXRFFPSSGVLIFGKXGAGANNTXLXNVMXTXEEEIKTTNPVATEQYGVVASNLQSSNTAPXTGXVNSQGALPGMVWQNRDVYLQGPIWAKIPHTDGNFHPSPLMGGFGLKHPPPQILIKNTPVPANPPXXFXPAKFASFITQYSTGQVSVEIEWELQKENSKRWNPEIQYTSNYAKSTNVDFAVNXEGVYXEPRPIGTRYLTRNL

SEQ ID NO: 1707 - protein, 737 aa, Artificial Sequence
  Description of Artificial Sequence: Synthetic polypeptide
  misc_feature (264)..(264): Xaa can be any naturally occurring amino acid
  misc_feature (448)..(448): Xaa can be any naturally occurring amino acid
  misc_feature (470)..(470): Xaa can be any naturally occurring amino acid
  misc_feature (533)..(533): Xaa can be any naturally occurring amino acid
  misc_feature (547)..(547): Xaa can be any naturally occurring amino acid
  misc_feature (555)..(555): Xaa can be any naturally occurring amino acid
  misc_feature (557)..(557): Xaa can be any naturally occurring amino acid
  misc_feature (561)..(561): Xaa can be any naturally occurring amino acid
  misc_feature (563)..(563): Xaa can be any naturally occurring amino acid
  misc_feature (593)..(593): Xaa can be any naturally occurring amino acid
  misc_feature (596)..(596): Xaa can be any naturally occurring amino acid
  misc_feature (662)..(662): Xaa can be any naturally occurring amino acid
  misc_feature (664)..(664): Xaa can be any naturally occurring amino acid
  misc_feature (718)..(718): Xaa can be any naturally occurring amino acid
MAADGYLPDWLEDNLSEGIREWWDLKPGAPKPKANQQKQDDGRGLVLPGYKYLGPFNGLDKGEPVNAADAAALEHDKAYDQQLKAGDNPYLRYNHADAEFQERLQEDTSFGGNLGRAVFQAKKRVLEPLGLVEEGAKTAPGKKRPVEPSPQRSPDSSTGIGKKGQQPAKKRLNFGQTGDSESVPDPQPLGEPPAGPSGLGSGTMAAGGGAPMADNNEGADGVGNASGNWHCDSTWLGDRVITTSTRTWALPTYNNHLYKQISSXSSGSTNDNHYFGYSTPWGYFDFNRFHCHFSPRDWQRLINNNWGFRPKRLNFKLFNIQVKEVTTNDGVTTIANNLTSTVQVFSDSEYQLPYVLGSAHQGCLPPFPADVFMIPQYGYLTLNNGSQAVGRSSFYCLEYFPSQMLRTGNNFTFSYTFEDVPFHSSYAHSQSLDRLMNPLIDQYLYYLXRTQSTGGTAGNRELLFSQGGPXNMSAQAKNWLPGPCYRQQRVSKTLSQNNNSNFAWTGATKYHLNGRDSLVNPGVAMATHKDDEXRFFPSSGVLIFGKXGAGANNTXLXNVMXTXEEEIKTTNPVATEQYGVVASNLQSSNTAPXTGXVNSQGALPGMVWQNRDVYLQGPIWAKIPHTDGNFHPSPLMGGFGLKHPPPQILIKNTPVPANPPAXFXPAKFASFITQYSTGQVSVEIEWELQKENSKRWNPEIQYTSNYAKSTNVDFAVNXEGVYSEPRPIGTRYLTRNL

SEQ ID NO: 1708 - DNA, 2217 bp, Artificial Sequence
  Description of Artificial Sequence: Synthetic polynucleotide
atggctgccgatggttatcttccagattggctcgaggacactctctctgaaggaataagacagtggtggaagctcaaacctggcccaccaccaccaaagcccgcagagcggcataaggacgacagcaggggtcttgtgcttcctgggtacaagtacctcggacccttcaacggactcgacaagggagagccggtcaacgaggcagacgccgcggccctcgagcacgacaaagcctacgaccggcagctcgacagcggagacaacccgtacctcaagtacaaccacgccgacgcggagtttcaggagcgccttaaagaagatacgtcttttgggggcaacctcggacgagcagtcttccaggcgaaaaagagggttcttgaacctctgggcctggttgaggaacctgttaagacggctccgggaaagaagagaccggtagagccatcaccccagcgttctccagactcctctacgggcatcggcaagaaaggccaacagcccgccagaaaaagactcaattttggtcagactggcgactcagagtcagttccagaccctcaacctctcggagaacctccagcagcgccctctggtgtgggacctaatacaatggctgcaggcggtggcgcaccaatggcagacaataacgaaggcgccgacggagtgggtagttcctcgggaaattggcattgcgattccacatggctgggcgacagagtcatcaccaccagcacccgaacctgggccctgcccacctacaacaaccacctctacaagcaaatctccaacgggacatcgggaggagccaccaacgacaacacctacttcggctacagcaccccctgggggtattttgactttaacagattccactgccacttttcaccacgtgactggcagcgactcatcaacaacaactggggattccggcccaagagactcagcttcaagctcttcaacatccaggtcaaggaggtcacgcagaatgaaggcaccaagaccatcgccaataacctcaccagcaccatccaggtgtttacggactcggagtaccagctgccgtacgttctcggctctgcccaccagggctgcctgcctccgttcccggcggacgtgttcatgattccccagtacggctacctaacactcaacaacggtagtcaggccgtgggacgctcctccttctactgcctggaatactttccttcgcagatgctgagaaccggcaacaacttccagtttacttacaccttcgaggacgtgcctttccacagcagctacgcccacagccagagcttggaccggctgatgaatcctctgattgaccagtacctgtactacttgtctcggactcaaacaacaggaggcacggcaaatacgcagactctgggcttcagccaaggtgggcctaatacaatggccaatcaggcaaagaactggctgccaggaccctgttaccgccaacaacgcgtctcaacgacaaccgggcaaaacaacaatagcaactttgcctggactgctgggaccaaataccatctgaatggaagaaattcattggctaatcctggcatcgctatggcaacacacaaagacgacgaggagcgtttttttcccagtaacgggatcctgatttttggcaaacaaaatgctgccagagacaatgcggattacagcgatgtcatgctcaccagcgaggaagaaatcaaaaccactaaccctgtggctacagaggaatacggtatcgtggcagataacttgcagcagcaaaacacggctcctcaaattggaactgtcaacagccagggggccttacccggtatggtctggcagaaccgggacgtgtacctgcagggtcccatctgggccaagattcctcacacggacggcaacttccacccgtctccgctgatgggcggctttggcctgaaacatcctccgcctcagatcctgatcaagaacacgcctgtacctgcggatcctccgaccaccttcaaccagtcaaagctgaactctttcatcacgcaatacagcaccggacaggtcagcgtggaaattgaatgggagctgcagaaggaaaacagcaagcgctggaaccccgagatccagtacacctccaactactacaaatctacaagtgtggactttgctgttaatacagaaggcgtgtactctgaaccccgccccattggcacccgttacctcacccgtaatctgtaa

SEQ ID NO: 1709 - protein, 733 aa, Artificial Sequence; identical to SEQ ID NO: 1494
  Description of Artificial Sequence: Synthetic polypeptide

SEQ ID NO: 1710 - DNA, 2203 bp, Artificial Sequence
  Description of Artificial Sequence: Synthetic polynucleotide
atgtcttttgttgatcaccctccagattggttggaagaagttggtgaaggtcttcgcgagtttttgggccttgaagcgggcccaccgaaaccaaaacccaatcagcagcatcaagatcaagcccgtggtcttgtgctgcctggttataactatctcggacccggaaacggtctcgatcgaggagagcctgtcaacagggcagacgaggtcgcgcgagagcacgacatctcgtacaacgagcagcttgaggcgggagacaacccctacctcaagtacaaccacgcggacgccgagtttcaggagaagctcgccgacgacacatccttcgggggaaacctcggaaaggcagtctttcaggccaagaaaagggttctcgaaccttttggcctggttgaagagggtgctaagacggcccctaccggaaagcggatagacgaccactttccaaaaagaaagaaggctcggaccgaagaggactccaagccttccacctcgtcagacgccgaagctggacccagcggatcccagcagctgcaaatcccagcccaaccagcctcaagtttgggagctgatacaatgtctgcgggaggtggcggcccattgggcgacaataaccaaggtgccgatggagtgggcaatgcctcgggagattggcattgcgattccacgtggatgggggacagagtcgtcaccaagtccacccgaacctgggtgctgcccagctacaacaaccaccagtaccgagagatcaaaagcggctccgtcgacggaagcaacgccaacgcctactttggatacagcaccccctgggggtactttgactttaaccgcttccacagccactggagcccccgagactggcaaagactcatcaacaactactggggcttcagaccccggtccctcagagtcaaaatcttcaacattcaagtcaaagaggtcacggtgcaggactccaccaccaccatcgccaacaacctcacctccaccgtccaagtgtttacggacgacgactaccagctgccctacgtcgtcggcaacgggaccgagggatgcctgccggccttccctccgcaggtctttacgctgccgcagtacggttacgcgacgctgaaccgcgacaacacagaaaatcccaccgagaggagcagcttcttctgcctagagtactttcccagcaagatgctgagaacgggcaacaactttgagtttacctacaactttgaggaggtgcccttccactccagcttcgctcccagtcagaacctgttcaagctggccaacccgctggtggaccagtacttgtaccgcttcgtgagcacaaataacactggcggagtccagttcaacaagaacctggccgggagatacgccaacacctacaaaaactggttcccggggcccatgggccgaacccagggctggaacctgggctccggggtcaaccgcgccagtgtcagcgccttcgccacgaccaataggatggagctcgagggcgcgagttaccaggtgcccccgcagccgaacggcatgaccaacaacctccagggcagcaacacctatgccctggagaacactatgatcttcaacagccagccggcgaacccgggcaccaccgccacgtacctcgagggcaacatgctcatcaccagcgagagcgagacgcagccggtgaaccgcgtggcgtacaacgtcggcgggcaggtggccaccaacaaccagagctccaccactgcccccgcgaccggcacgtacaacctccaggaaatcgtgcccggcagcgtgtggatggagagggacgtgtacctccaaggacccatctgggccaagatcccagagacgggggcgcactttcacccctctccggccatgggcggattcggactcaaacacccaccgcccatgatgctcatcaagaacacgcctgtgcccggaaatatcaccagcttctcggacgtgcccgtcagcagcttcatcacccagtacagcaccgggcaggtcaccgtggagatggagtgggagctcaagaaggaaaactccaagaggtggaacccagagatccagtacacaaacaactacaacgacccccagtttgtggactttgccccggacagcaccggggaatacagaaccaccagacctatcggaacccgataccttacccgacccctttaacccattcatgtcgcataccctcaataaa

SEQ ID NO: 1711 - protein, 724 aa, Artificial Sequence
  Description of Artificial Sequence: Synthetic polypeptide
MSFVDHPPDWLEEVGEGLREFLGLEAGPPKPKPNQQHQDQARGLVLPGYNYLGPGNGLDRGEPVNRADEVAREHDISYNEQLEAGDNPYLKYNHADAEFQEKLADDTSFGGNLGKAVFQAKKRVLEPFGLVEEGAKTAPTGKRIDDHFPKRKKARTEEDSKPSTSSDAEAGPSGSQQLQIPAQPASSLGADTMSAGGGGPLGDNNQGADGVGNASGDWHCDSTWMGDRVVTKSTRTWVLPSYNNHQYREIKSGSVDGSNANAYFGYSTPWGYFDFNRFHSHWSPRDWQRLINNYWGFRPRSLRVKIFNIQVKEVTVQDSTTTIANNLTSTVQVFTDDDYQLPYVVGNGTEGCLPAFPPQVFTLPQYGYATLNRDNTENPTERSSFFCLEYFPSKMLRTGNNFEFTYNFEEVPFHSSFAPSQNLFKLANPLVDQYLYRFVSTNNTGGVQFNKNLAGRYANTYKNWFPGPMGRTQGWNLGSGVNRASVSAFATTNRMELEGASYQVPPQPNGMTNNLQGSNTYALENTMIFNSQPANPGTTATYLEGNMLITSESETQPVNRVAYNVGGQVATNNQSSTTAPATGTYNLQEIVPGSVWMERDVYLQGPIWAKIPETGAHFHPSPAMGGFGLKHPPPMMLIKNTPVPGNITSFSDVPVSSFITQYSTGQVTVEMEWELKKENSKRWNPEIQYTNNYNDPQFVDFAPDSTGEYRTTRPIGTRYLTRPL

SEQ ID NO: 1712 - DNA, 2203 bp, Artificial Sequence
  Description of Artificial Sequence: Synthetic polynucleotide
atgtcttttgttgatcaccctccagattggttggaagaagttggtgaaggtcttcgcgagtttttgggccttgaagcgggcccaccgaaaccaaaacccaatcagcagcatcaagatcaagcccgtggtcttgtgctgcctggttataactatctcggacccggaaacggtctcgatcgaggagagcctgtcaacagggcagacgaggtcgcgcgagagcacgacatctcgtacaacgagcagcttgaggcgggagacaacccctacctcaagtacaaccacgcggacgccgagtttcaggagaagctcgccgacgacacatccttcgggggaaacctcggaaaggcagtctttcaggccaagaaaagggttctcgaaccttttggcctggttgaagagggtgctaagacggcccctaccggaaagcggatagacgaccactttccaaaaagaaagaaggctcggaccgaagaggactccaagccttccacctcgtcagacgccgaagctggacccagcggatcccagcagctgcaaatcccagcccaaccagcctcaagtttgggagctgatacaatgtctgcgggaggtggcggcccattgggcgacaataaccaaggtgccgatggagtgggcaatgcctcgggagattggcattgcgattccacgtggatgggggacagagtcgtcaccaagtccacccgaacctgggtgctgcccagctacaacaaccaccagtaccgagagatcaaaagcggctccgtcgacggaagcaacgccaacgcctactttggatacagcaccccctgggggtactttgactttaaccgcttccacagccactggagcccccgagactggcaaagactcatcaacaactactggggcttcagaccccggtccctcagagtcaaaatcttcaacattcaagtcaaagaggtcacggtgcaggactccaccaccaccatcgccaacaacctcacctccaccgtccaagtgtttacggacgacgactaccagctgccctacgtcgtcggcaacgggaccgagggatgcctgccggccttccctccgcaggtctttacgctgccgcagtacggttacgcgacgctgaaccgcgacaacacagaaaatcccaccgagaggagcagcttcttctgcctagagtactttcccagcaagatgctgagaacgggcaacaactttgagtttacctacaactttgaggaggtgcccttccactccagcttcgctcccagtcagaacctgttcaagctggccaacccgctggtggaccagtacttgtaccgcttcgtgagcacaaataacactggcggagtccagttcaacaagaacctggccgggagatacgccaacacctacaaaaactggttcccggggcccatgggccgaacccagggctggaacctgggctccggggtcaaccgcgccagtgtcagcgccttcgccacgaccaataggatggagctcgagggcgcgagttaccaggtgcccccgcagccgaacggcatgaccaacaacctccagggcagcaacacctatgccctggagaacactatgatcttcaacagccagccggcgaacccgggcaccaccgccacgtacctcgagggcaacatgctcatcaccagcgagagcgagacgcagccggtgaaccgcgtggcgtacaacgtcggcgggcagatggccaccaacaaccagagctccaccactgcccccgcgaccggcacggtcaacctccaggaaatcgtgcccggcagcgtgtggatggagagggacgtgtacctccaaggacccatctgggccaagatcccagagacgggggcgcactttcacccctctccggccatgggcggattcggactcaaacacccaccgcccatgatgctcatcaagaacacgcctgtgcccggaaatatcaccagcttctcggacgtgcccgtcagcagcttcatcacccagtacagcaccgggcaggtcaccgtggagatggagtgggagctcaagaaggaaaactccaagaggtggaacccagagatccagtacacaaacaactacaacgacccccagtttgtggactttgccccggacagcaccggggaatacagaaccaccagacctatcggaacccgataccttacccgacccctttaacccattcatgtcgcataccctcaataaa

SEQ ID NO: 1713 - protein, 724 aa, Artificial Sequence
  Description of Artificial Sequence: Synthetic polypeptide
MSFVDHPPDWLEEVGEGLREFLGLEAGPPKPKPNQQHQDQARGLVLPGYNYLGPGNGLDRGEPVNRADEVAREHDISYNEQLEAGDNPYLKYNHADAEFQEKLADDTSFGGNLGKAVFQAKKRVLEPFGLVEEGAKTAPTGKRIDDHFPKRKKARTEEDSKPSTSSDAEAGPSGSQQLQIPAQPASSLGADTMSAGGGGPLGDNNQGADGVGNASGDWHCDSTWMGDRVVTKSTRTWVLPSYNNHQYREIKSGSVDGSNANAYFGYSTPWGYFDFNRFHSHWSPRDWQRLINNYWGFRPRSLRVKIFNIQVKEVTVQDSTTTIANNLTSTVQVFTDDDYQLPYVVGNGTEGCLPAFPPQVFTLPQYGYATLNRDNTENPTERSSFFCLEYFPSKMLRTGNNFEFTYNFEEVPFHSSFAPSQNLFKLANPLVDQYLYRFVSTNNTGGVQFNKNLAGRYANTYKNWFPGPMGRTQGWNLGSGVNRASVSAFATTNRMELEGASYQVPPQPNGMTNNLQGSNTYALENTMIFNSQPANPGTTATYLEGNMLITSESETQPVNRVAYNVGGQMATNNQSSTTAPATGTVNLQEIVPGSVWMERDVYLQGPIWAKIPETGAHFHPSPAMGGFGLKHPPPMMLIKNTPVPGNITSFSDVPVSSFITQYSTGQVTVEMEWELKKENSKRWNPEIQYTNNYNDPQFVDFAPDSTGEYRTTRPIGTRYLTRPL

SEQ ID NO: 1714 - DNA, 2203 bp, Artificial Sequence
  Description of Artificial Sequence: Synthetic polynucleotide
atgtcttttgttgatcaccctccagattggttggaagaagttggtgaaggtcttcgcgagtttttgggccttgaagcgggcccaccgaaaccaaaacccaatcagcagcatcaagatcaagcccgtggtcttgtgctgcctggttataactatctcggacccggaaacggtctcgatcgaggagagcctgtcaacagggcagacgaggtcgcgcgagagcacgacatctcgtacaacgagcagcttgaggcgggagacaacccctacctcaagtacaaccacgcggacgccgagtttcaggagaagctcgccgacgacacatccttcgggggaaacctcggaaaggcagtctttcaggccaagaaaagggttctcgaaccttttggcctggttgaagagggtgctaagacggcccctaccggaaagcggatagacgaccactttccaaaaagaaagaaggctcggaccgaagaggactccaagccttccacctcgtcagacgccgaagctggacccagcggatcccagcagctgcaaatcccagcccaaccagcctcaagtttgggagctgatacaatgtctgcgggaggtggcggcccattgggcgacaataaccaaggtgccgatggagtgggcaatgcctcgggagattggcattgcgattccacgtggatgggggacagagtcgtcaccaagtccacccgaacctgggtgctgcccagctacaacaaccaccagtaccgagagatcaaaagcggctccgtcgacggaagcaacgccaacgcctactttggatacagcaccccctgggggtactttgactttaaccgcttccacagccactggagcccccgagactggcaaagactcatcaacaactactggggcttcagaccccggtccctcagagtcaaaatcttcaacattcaagtcaaagaggtcacggtgcaggactccaccaccaccatcgccaacaacctcacctccaccgtccaagtgtttacggacgacgactaccagctgccctacgtcgtcggcaacgggaccgagggatgcctgccggccttccctccgcaggtctttacgctgccgcagtacggttacgcgacgctgaaccgcgacaacacagaaaatcccaccgagaggagcagcttcttctgcctagagtactttcccagcaagatgctgagaacgggcaacaactttgagtttacctacaactttgaggaggtgcccttccactccagcttcgctcccagtcagaacctgttcaagctggccaacccgctggtggaccagtacttgtaccgcttcgtgagcacaaataacactggcggagtccagttcaacaagaacctggccgggagatacgccaacacctacaaaaactggttcccggggcccatgggccgaacccagggctggaacctgggctccggggtcaaccgcgccagtgtcagcgccttcgccacgaccaataggatggagctcgagggcgcgagttaccaggtgcccccgcagccgaacggcatgaccaacaacctccagggcagcaacacctatgccctggagaacactatgatcttcaacagccagccggcgaacccgggcaccaccgccacgtacctcgagggcaacatgctcatcaccagcgagagcgagacgcagccggtgaaccgcgtggcgtacaacgtcggcgggcagatggccaccaacaaccagagctccaccactgcccccgcgaccggcacgtacaacacccaggaaatcgtgcccggcagcgtgtggatggagagggacgtgtacctccaaggacccatctgggccaagatcccagagacgggggcgcactttcacccctctccggccatgggcggattcggactcaaacacccaccgcccatgatgctcatcaagaacacgcctgtgcccggaaatatcaccagcttctcggacgtgcccgtcagcagcttcatcacccagtacagcaccgggcaggtcaccgtggagatggagtgggagctcaagaaggaaaactccaagaggtggaacccagagatccagtacacaaacaactacaacgacccccagtttgtggactttgccccggacagcaccggggaatacagaaccaccagacctatcggaacccgataccttacccgacccctttaacccattcatgtcgcataccctcaataaa

SEQ ID NO: 1715 - protein, 724 aa, Artificial Sequence
  Description of Artificial Sequence: Synthetic polypeptide
MSFVDHPPDWLEEVGEGLREFLGLEAGPPKPKPNQQHQDQARGLVLPGYNYLGPGNGLDRGEPVNRADEVAREHDISYNEQLEAGDNPYLKYNHADAEFQEKLADDTSFGGNLGKAVFQAKKRVLEPFGLVEEGAKTAPTGKRIDDHFPKRKKARTEEDSKPSTSSDAEAGPSGSQQLQIPAQPASSLGADTMSAGGGGPLGDNNQGADGVGNASGDWHCDSTWMGDRVVTKSTRTWVLPSYNNHQYREIKSGSVDGSNANAYFGYSTPWGYFDFNRFHSHWSPRDWQRLINNYWGFRPRSLRVKIFNIQVKEVTVQDSTTTIANNLTSTVQVFTDDDYQLPYVVGNGTEGCLPAFPPQVFTLPQYGYATLNRDNTENPTERSSFFCLEYFPSKMLRTGNNFEFTYNFEEVPFHSSFAPSQNLFKLANPLVDQYLYRFVSTNNTGGVQFNKNLAGRYANTYKNWFPGPMGRTQGWNLGSGVNRASVSAFATTNRMELEGASYQVPPQPNGMTNNLQGSNTYALENTMIFNSQPANPGTTATYLEGNMLITSESETQPVNRVAYNVGGQMATNNQSSTTAPATGTYNTQEIVPGSVWMERDVYLQGPIWAKIPETGAHFHPSPAMGGFGLKHPPPMMLIKNTPVPGNITSFSDVPVSSFITQYSTGQVTVEMEWELKKENSKRWNPEIQYTNNYNDPQFVDFAPDSTGEYRTTRPIGTRYLTRPL

SEQ ID NO: 1716 - DNA, 2203 bp, Artificial Sequence
  Description of Artificial Sequence: Synthetic polynucleotide
atgtcttttgttgatcaccctccagattggttggaagaagttggtgaaggtcttcgcgagtttttgggccttgaagcgggcccaccgaaaccaaaacccaatcagcagcatcaagatcaagcccgtggtcttgtgctgcctggttataactatctcggacccggaaacggtctcgatcgaggagagcctgtcaacagggcagacgaggtcgcgcgagagcacgacatctcgtacaacgagcagcttgaggcgggagacaacccctacctcaagtacaaccacgcggacgccgagtttcaggagaagctcgccgacgacacatccttcgggggaaacctcggaaaggcagtctttcaggccaagaaaagggttctcgaaccttttggcctggttgaagagggtgctaagacggcccctaccggaaagcggatagacgaccactttccaaaaagaaagaaggctcggaccgaagaggactccaagccttccacctcgtcagacgccgaagctggacccagcggatcccagcagctgcaaatcccagcccaaccagcctcaagtttgggagctgatacaatgtctgcgggaggtggcggcccattgggcgacaataaccaaggtgccgatggagtgggcaatgcctcgggagattggcattgcgattccacgtggatgggggacagagtcgtcaccaagtccacccgaacctgggtgctgcccagctacaacaaccaccagtaccgagagatcaaaagcggctccgtcgacggaagcaacgccaacgcctactttggatacagcaccccctgggggtactttgactttaaccgcttccacagccactggagcccccgagactggcaaagactcatcaacaactactggggcttcagaccccggtccctcagagtcaaaatcttcaacattcaagtcaaagaggtcacggtgcaggactccaccaccaccatcgccaacaacctcacctccaccgtccaagtgtttacggacgacgactaccagctgccctacgtcgtcggcaacgggaccgagggatgcctgccggccttccctccgcaggtctttacgctgccgcagtacggttacgcgacgctgaaccgcgacaacacagaaaatcccaccgagaggagcagcttcttctgcctagagtactttcccagcaagatgctgagaacgggcaacaactttgagtttacctacaactttgaggaggtgcccttccactccagcttcgctcccagtcagaacctgttcaagctggccaacccgctggtggaccagtacttgtaccgcttcgtgagcacaaataacactggcggagtccagttcaacaagaacctggccgggagatacgccaacacctacaaaaactggttcccggggcccatgggccgaacccagggctggaacctgggctccggggtcaaccgcgccagtgtcagcgccttcgccacgaccaataggatggagctcgagggcgcgagttaccaggtgcccccgcagccgaacggcatgaccaacaacctccagggcagcaacacctatgccctggagaacactatgatcttcaacagccagccggcgaacccgggcaccaccgccacgtacctcgagggcaacatgctcatcaccagcgagagcgagacgcagccggtgaaccgcgtggcgtacaacgtcggcgggcagatggccaccaacaaccagagctccaccactgcccccgcgaccggcacggtcaacacccaggaaatcgtgcccggcagcgtgtggatggagagggacgtgtacctccaaggacccatctgggccaagatcccagagacgggggcgcactttcacccctctccggccatgggcggattcggactcaaacacccaccgcccatgatgctcatcaagaacacgcctgtgcccggaaatatcaccagcttctcggacgtgcccgtcagcagcttcatcacccagtacagcaccgggcaggtcaccgtggagatggagtgggagctcaagaaggaaaactccaagaggtggaacccagagatccagtacacaaacaactacaacgacccccagtttgtggactttgccccggacagcaccggggaatacagaaccaccagacctatcggaacccgataccttacccgacccctttaacccattcatgtcgcataccctcaataaa

SEQ ID NO: 1717 - protein, 724 aa, Artificial Sequence
  Description of Artificial Sequence: Synthetic polypeptide
MSFVDHPPDWLEEVGEGLREFLGLEAGPPKPKPNQQHQDQARGLVLPGYNYLGPGNGLDRGEPVNRADEVAREHDISYNEQLEAGDNPYLKYNHADAEFQEKLADDTSFGGNLGKAVFQAKKRVLEPFGLVEEGAKTAPTGKRIDDHFPKRKKARTEEDSKPSTSSDAEAGPSGSQQLQIPAQPASSLGADTMSAGGGGPLGDNNQGADGVGNASGDWHCDSTWMGDRVVTKSTRTWVLPSYNNHQYREIKSGSVDGSNANAYFGYSTPWGYFDFNRFHSHWSPRDWQRLINNYWGFRPRSLRVKIFNIQVKEVTVQDSTTTIANNLTSTVQVFTDDDYQLPYVVGNGTEGCLPAFPPQVFTLPQYGYATLNRDNTENPTERSSFFCLEYFPSKMLRTGNNFEFTYNFEEVPFHSSFAPSQNLFKLANPLVDQYLYRFVSTNNTGGVQFNKNLAGRYANTYKNWFPGPMGRTQGWNLGSGVNRASVSAFATTNRMELEGASYQVPPQPNGMTNNLQGSNTYALENTMIFNSQPANPGTTATYLEGNMLITSESETQPVNRVAYNVGGQMATNNQSSTTAPATGTVNTQEIVPGSVWMERDVYLQGPIWAKIPETGAHFHPSPAMGGFGLKHPPPMMLIKNTPVPGNITSFSDVPVSSFITQYSTGQVTVEMEWELKKENSKRWNPEIQYTNNYNDPQFVDFAPDSTGEYRTTRPIGTRYLTRPL

SEQ ID NO: 1718 - DNA, 2203 bp, Artificial Sequence
  Description of Artificial Sequence: Synthetic polynucleotide
atgtcttttgttgatcaccctccagattggttggaagaagttggtgaaggtcttcgcgagtttttgggccttgaagcgggcccaccgaaaccaaaacccaatcagcagcatcaagatcaagcccgtggtcttgtgctgcctggttataactatctcggacccggaaacggtctcgatcgaggagagcctgtcaacagggcagacgaggtcgcgcgagagcacgacatctcgtacaacgagcagcttgaggcgggagacaacccctacctcaagtacaaccacgcggacgccgagtttcaggagaagctcgccgacgacacatccttcgggggaaacctcggaaaggcagtctttcaggccaagaaaagggttctcgaaccttttggcctggttgaagagggtgctaagacggcccctaccggaaagcggatagacgaccactttccaaaaagaaagaaggctcggaccgaagaggactccaagccttccacctcgtcagacgccgaagctggacccagcggatcccagcagctgcaaatcccagcccaaccagcctcaagtttgggagctgatacaatgtctgcgggaggtggcggcccattgggcgacaataaccaaggtgccgatggagtgggcaatgcctcgggagattggcattgcgattccacgtggatgggggacagagtcgtcaccaagtccacccgaacctgggtgctgcccagctacaacaaccaccagtaccgagagatcaaaagcggctccgtcgacggaagcaacgccaacgcctactttggatacagcaccccctgggggtactttgactttaaccgcttccacagccactggagcccccgagactggcaaagactcatcaacaactactggggcttcagaccccggtccctcagagtcaaaatcttcaacattcaagtcaaagaggtcacggtgcaggactccaccaccaccatcgccaacaacctcacctccaccgtccaagtgtttacggacgacgactaccagctgccctacgtcgtcggcaacgggaccgagggatgcctgccggccttccctccgcaggtctttacgctgccgcagtacggttacgcgacgctgaaccgcgacaacacagaaaatcccaccgagaggagcagcttcttctgcctagagtactttcccagcaagatgctgagaacgggcaacaactttgagtttacctacaactttgaggaggtgcccttccactccagcttcgctcccagtcagaacctgttcaagctggccaacccgctggtggaccagtacttgtaccgcttcgtgagcacaaataacactggcggagtccagttcaacaagaacctggccgggagatacgccaacacctacaaaaactggttcccggggcccatgggccgaacccagggctggaacctgggctccggggtcaaccgcgccagtgtcagcgccttcgccacgaccaataggatggagctcgagggcgcgagttaccaggtgcccccgcagccgaacggcatgaccaacaacctccagggcagcaacacctatgccctggagaacactatgatcttcaacagccagccggcgaacccgggcaccaccgccacgtacctcgagggcaacatgctcatcaccagcgagagcgagacgcagccggtgaaccgcgtggcgtacaacgtcggcgggcagatggccaccaacaaccagagctccaccactgcccccgcgaccggcacgtacaacctccaggaaatcgtgcccggcagcgtgtggatggagagggacgtgtacctccaaggacccatctgggccaagatcccagagacgggggcgcactttcacccctctccggccatgggcggattcggactcaaacacccaccgcccatgatgctcatcaagaacacgcctgtgcccggaaatatcaccagcttctcggccgtgcccgtcagcagcttcatcacccagtacagcaccgggcaggtcaccgtggagatggagtgggagctcaagaaggaaaactccaagaggtggaacccagagatccagtacacaaacaactacaacgacccccagtttgtggactttgccccggacagcaccggggaatacagaaccaccagacctatcggaacccgataccttacccgacccctttaacccattcatgtcgcataccctcaataaa

SEQ ID NO: 1719 - protein, 724 aa, Artificial Sequence
  Description of Artificial Sequence: Synthetic polypeptide
MSFVDHPPDWLEEVGEGLREFLGLEAGPPKPKPNQQHQDQARGLVLPGYNYLGPGNGLDRGEPVNRADEVAREHDISYNEQLEAGDNPYLKYNHADAEFQEKLADDTSFGGNLGKAVFQAKKRVLEPFGLVEEGAKTAPTGKRIDDHFPKRKKARTEEDSKPSTSSDAEAGPSGSQQLQIPAQPASSLGADTMSAGGGGPLGDNNQGADGVGNASGDWHCDSTWMGDRVVTKSTRTWVLPSYNNHQYREIKSGSVDGSNANAYFGYSTPWGYFDFNRFHSHWSPRDWQRLINNYWGFRPRSLRVKIFNIQVKEVTVQDSTTTIANNLTSTVQVFTDDDYQLPYVVGNGTEGCLPAFPPQVFTLPQYGYATLNRDNTENPTERSSFFCLEYFPSKMLRTGNNFEFTYNFEEVPFHSSFAPSQNLFKLANPLVDQYLYRFVSTNNTGGVQFNKNLAGRYANTYKNWFPGPMGRTQGWNLGSGVNRASVSAFATTNRMELEGASYQVPPQPNGMTNNLQGSNTYALENTMIFNSQPANPGTTATYLEGNMLITSESETQPVNRVAYNVGGQMATNNQSSTTAPATGTYNLQEIVPGSVWMERDVYLQGPIWAKIPETGAHFHPSPAMGGFGLKHPPPMMLIKNTPVPGNITSFSAVPVSSFITQYSTGQVTVEMEWELKKENSKRWNPEIQYTNNYNDPQFVDFAPDSTGEYRTTRPIGTRYLTRPL

SEQ ID NO: 1720 - DNA, 2203 bp, Artificial Sequence
  Description of Artificial Sequence: Synthetic polynucleotide
atgtcttttgttgatcaccctccagattggttggaagaagttggtgaaggtcttcgcgagtttttgggccttgaagcgggcccaccgaaaccaaaacccaatcagcagcatcaagatcaagcccgtggtcttgtgctgcctggttataactatctcggacccggaaacggtctcgatcgaggagagcctgtcaacagggcagacgaggtcgcgcgagagcacgacatctcgtacaacgagcagcttgaggcgggagacaacccctacctcaagtacaaccacgcggacgccgagtttcaggagaagctcgccgacgacacatccttcgggggaaacctcggaaaggcagtctttcaggccaagaaaagggttctcgaaccttttggcctggttgaagagggtgctaagacggcccctaccggaaagcggatagacgaccactttccaaaaagaaagaaggctcggaccgaagaggactccaagccttccacctcgtcagacgccgaagctggacccagcggatcccagcagctgcaaatcccagcccaaccagcctcaagtttgggagctgatacaatgtctgcgggaggtggcggcccattgggcgacaataaccaaggtgccgatggagtgggcaatgcctcgggagattggcattgcgattccacgtggatgggggacagagtcgtcaccaagtccacccgaacctgggtgctgcccagctacaacaaccaccagtaccgagagatcaaaagcggctccgtcgacggaagcaacgccaacgcctactttggatacagcaccccctgggggtactttgactttaaccgcttccacagccactggagcccccgagactggcaaagactcatcaacaactactggggcttcagaccccggtccctcagagtcaaaatcttcaacattcaagtcaaagaggtcacggtgcaggactccaccaccaccatcgccaacaacctcacctccaccgtccaagtgtttatggacgacgactaccagctgccctacgtcgtcggcaacgggaccgagggatgcctgccggccttccctccgcaggtctttacgctgccgcagtacggttacgcgacgctgaaccgcgacaacacagaaaatcccaccgagaggagcagcttcttctgcctagagtactttcccagcaagatgctgagaacgggcaacaactttgagtttacctacaactttgaggaggtgcccttccactccagcttcgctcccagtcagaacctgttcaagctggccaacccgctggtggaccagtacttgtaccgcttcgtgagcacaaataacactggcggagtccagttcaacaagaacctggccgggagatacgccaacacctacaaaaactggttcccggggcccatgggccgaacccagggctggaacctgggctccggggtcaaccgcgccagtgtcagcgccttcgccacgaccaataggatggagctcgagggcgcgagttaccaggtgcccccgcagccgaacggcatgaccaacaacctccagggcagcaacacctatgccctggagaacactatgatcttcaacagccagccggcgaacccgggcaccaccgccacgtacctcgagggcaacatgctcatcaccagcgagagcgagacgcagccggtgaaccgcgtggcgtacaacgtcggcgggcagatggccaccaacaaccagagctccaccactgcccccgcgaccggcacgtacaacctccaggaaatcgtgcccggcagcgtgtggatggagagggacgtgtacctccaaggacccatctgggccaagatcccagagacgggggcgcactttcacccctctccggccatgggcggattcggactcaaacacccaccgcccatgatgctcatcaagaacacgcctgtgcccggaaatatcaccagcttctcggacgtgcccgtcagcagcttcatcacccagtacagcaccgggcaggtcaccgtggagatggagtgggagctcaagaaggaaaactccaagaggtggaacccagagatccagtacacaaacaactacaacgacccccagtttgtggactttgccccggacagcaccggggaatacagaaccaccagacctatcggaacccgataccttacccgacccctttaacccattcatgtcgcataccctcaataaa

SEQ ID NO: 1721 - protein, 724 aa, Artificial Sequence
  Description of Artificial Sequence: Synthetic polypeptide
MSFVDHPPDWLEEVGEGLREFLGLEAGPPKPKPNQQHQDQARGLVLPGYNYLGPGNGLDRGEPVNRADEVAREHDISYNEQLEAGDNPYLKYNHADAEFQEKLADDTSFGGNLGKAVFQAKKRVLEPFGLVEEGAKTAPTGKRIDDHFPKRKKARTEEDSKPSTSSDAEAGPSGSQQLQIPAQPASSLGADTMSAGGGGPLGDNNQGADGVGNASGDWHCDSTWMGDRVVTKSTRTWVLPSYNNHQYREIKSGSVDGSNANAYFGYSTPWGYFDFNRFHSHWSPRDWQRLINNYWGFRPRSLRVKIFNIQVKEVTVQDSTTTIANNLTSTVQVFMDDDYQLPYVVGNGTEGCLPAFPPQVFTLPQYGYATLNRDNTENPTERSSFFCLEYFPSKMLRTGNNFEFTYNFEEVPFHSSFAPSQNLFKLANPLVDQYLYRFVSTNNTGGVQFNKNLAGRYANTYKNWFPGPMGRTQGWNLGSGVNRASVSAFATTNRMELEGASYQVPPQPNGMTNNLQGSNTYALENTMIFNSQPANPGTTATYLEGNMLITSESETQPVNRVAYNVGGQMATNNQSSTTAPATGTYNLQEIVPGSVWMERDVYLQGPIWAKIPETGAHFHPSPAMGGFGLKHPPPMMLIKNTPVPGNITSFSDVPVSSFITQYSTGQVTVEMEWELKKENSKRWNPEIQYTNNYNDPQFVDFAPDSTGEYRTTRPIGTRYLTRPL

SEQ ID NO: 1722 - DNA, 2203 bp, Artificial Sequence
  Description of Artificial Sequence: Synthetic polynucleotide
atgtcttttgttgatcaccctccagattggttggaagaagttggtgaaggtcttcgcgagtttttgggccttgaagcgggcccaccgaaaccaaaacccaatcagcagcatcaagatcaagcccgtggtcttgtgctgcctggttataactatctcggacccggaaacggtctcgatcgaggagagcctgtcaacagggcagacgaggtcgcgcgagagcacgacatctcgtacaacgagcagcttgaggcgggagacaacccctacctcaagtacaaccacgcggacgccgagtttcaggagaagctcgccgacgacacatccttcgggggaaacctcggaaaggcagtctttcaggccaagaaaagggttctcgaaccttttggcctggttgaagagggtgctaagacggcccctaccggaaagcggatagacgaccactttccaaaaagaaagaaggctcggaccgaagaggactccaagccttccacctcgtcagacgccgaagctggacccagcggatcccagcagctgcaaatcccagcccaaccagcctcaagtttgggagctgatacaatgtctgcgggaggtggcggcccattgggcgacaataaccaaggtgccgatggagtgggcaatgcctcgggagattggcattgcgattccacgtggatgggggacagagtcgtcaccaagtccacccgaacctgggtgctgcccagctacaacaaccaccagtaccgagagatcaaaagcggctccgtcgacggaagcaacgccaacgcctactttggatacagcaccccctgggggtactttgactttaaccgcttccacagccactggagcccccgagactggcaaagactcatcaacaactactggggcttcagaccccggtccctcagagtcaaaatcttcaacattcaagtcaaagaggtcacggtgcaggactccaccaccaccatcgccaacaacctcacctccaccgtcgatgtgtttacggacgacgactaccagctgccctacgtcgtcggcaacgggaccgagggatgcctgccggccttccctccgcaggtctttacgctgccgcagtacggttacgcgacgctgaaccgcgacaacacagaaaatcccaccgagaggagcagcttcttctgcctagagtactttcccagcaagatgctgagaacgggcaacaactttgagtttacctacaactttgaggaggtgcccttccactccagcttcgctcccagtcagaacctgttcaagctggccaacccgctggtggaccagtacttgtaccgcttcgtgagcacaaataacactggcggagtccagttcaacaagaacctggccgggagatacgccaacacctacaaaaactggttcccggggcccatgggccgaacccagggctggaacctgggctccggggtcaaccgcgccagtgtcagcgccttcgccacgaccaataggatggagctcgagggcgcgagttaccaggtgcccccgcagccgaacggcatgaccaacaacctccagggcagcaacacctatgccctggagaacactatgatcttcaacagccagccggcgaacccgggcaccaccgccacgtacctcgagggcaacatgctcatcaccagcgagagcgagacgcagccggtgaaccgcgtggcgtacaacgtcggcgggcagatggccaccaacaaccagagctccaccactgcccccgcgaccggcacgtacaacctccaggaaatcgtgcccggcagcgtgtggatggagagggacgtgtacctccaaggacccatctgggccaagatcccagagacgggggcgcactttcacccctctccggccatgggcggattcggactcaaacacccaccgcccatgatgctcatcaagaacacgcctgtgcccggaaatatcaccagcttctcggacgtgcccgtcagcagcttcatcacccagtacagcaccgggcaggtcaccgtggagatggagtgggagctcaagaaggaaaactccaagaggtggaacccagagatccagtacacaaacaactacaacgacccccagtttgtggactttgccccggacagcaccggggaatacagaaccaccagacctatcggaacccgataccttacccgacccctttaacccattcatgtcgcataccctcaataaa

SEQ ID NO: 1723 - protein, 724 aa, Artificial Sequence
  Description of Artificial Sequence: Synthetic polypeptide
MSFVDHPPDWLEEVGEGLREFLGLEAGPPKPKPNQQHQDQARGLVLPGYNYLGPGNGLDRGEPVNRADEVAREHDISYNEQLEAGDNPYLKYNHADAEFQEKLADDTSFGGNLGKAVFQAKKRVLEPFGLVEEGAKTAPTGKRIDDHFPKRKKARTEEDSKPSTSSDAEAGPSGSQQLQIPAQPASSLGADTMSAGGGGPLGDNNQGADGVGNASGDWHCDSTWMGDRVVTKSTRTWVLPSYNNHQYREIKSGSVDGSNANAYFGYSTPWGYFDFNRFHSHWSPRDWQRLINNYWGFRPRSLRVKIFNIQVKEVTVQDSTTTIANNLTSTVDVFTDDDYQLPYVVGNGTEGCLPAFPPQVFTLPQYGYATLNRDNTENPTERSSFFCLEYFPSKMLRTGNNFEFTYNFEEVPFHSSFAPSQNLFKLANPLVDQYLYRFVSTNNTGGVQFNKNLAGRYANTYKNWFPGPMGRTQGWNLGSGVNRASVSAFATTNRMELEGASYQVPPQPNGMTNNLQGSNTYALENTMIFNSQPANPGTTATYLEGNMLITSESETQPVNRVAYNVGGQMATNNQSSTTAPATGTYNLQEIVPGSVWMERDVYLQGPIWAKIPETGAHFHPSPAMGGFGLKHPPPMMLIKNTPVPGNITSFSDVPVSSFITQYSTGQVTVEMEWELKKENSKRWNPEIQYTNNYNDPQFVDFAPDSTGEYRTTRPIGTRYLTRPL

SEQ ID NO: 1724 - DNA, 2203 bp, Artificial Sequence
  Description of Artificial Sequence: Synthetic polynucleotide
atgtcttttgttgatcaccctccagattggttggaagaagttggtgaaggtcttcgcgagtttttgggccttgaagcgggcccaccgaaaccaaaacccaatcagcagcatcaagatcaagcccgtggtcttgtgctgcctggttataactatctcggacccggaaacggtctcgatcgaggagagcctgtcaacagggcagacgaggtcgcgcgagagcacgacatctcgtacaacgagcagcttgaggcgggagacaacccctacctcaagtacaaccacgcggacgccgagtttcaggagaagctcgccgacgacacatccttcgggggaaacctcggaaaggcagtctttcaggccaagaaaagggttctcgaaccttttggcctggttgaagagggtgctaagacggcccctaccggaaagcggatagacgaccactttccaaaaagaaagaaggctcggaccgaagaggactccaagccttccacctcgtcagacgccgaagctggacccagcggatcccagcagctgcaaatcccagcccaaccagcctcaagtttgggagctgatacaatgtctgcgggaggtggcggcccattgggcgacaataaccaaggtgccgatggagtgggcaatgcctcgggagattggcattgcgattccacgtggatgggggacagagtcgtcaccaagtccacccgaacctgggtgctgcccagctacaacaaccaccagtaccgagagatcaaaagcggctccgtcgacggaagcaacgccaacgcctactttggatacagcaccccctgggggtactttgactttaaccgcttccacagccactggagcccccgagactggcaaagactcatcaacaactactggggcttcagaccccggtccctcagagtcaaaatcttcaacattcaagtcaaagaggtcacggtgcaggactccaccaccaccatcgccaacaacctcacctccaccgtccaagtgtttacggacgacgactaccagctgccctacgtcgtcggcaacgggacccagggatgcctgccggccttccctccgcaggtctttacgctgccgcagtacggttacgcgacgctgaaccgcgacaacacagaaaatcccaccgagaggagcagcttcttctgcctagagtactttcccagcaagatgctgagaacgggcaacaactttgagtttacctacaactttgaggaggtgcccttccactccagcttcgctcccagtcagaacctgttcaagctggccaacccgctggtggaccagtacttgtaccgcttcgtgagcacaaataacactggcggagtccagttcaacaagaacctggccgggagatacgccaacacctacaaaaactggttcccggggcccatgggccgaacccagggctggaacctgggctccggggtcaaccgcgccagtgtcagcgccttcgccacgaccaataggatggagctcgagggcgcgagttaccaggtgcccccgcagccgaacggcatgaccaacaacctccagggcagcaacacctatgccctggagaacactatgatcttcaacagccagccggcgaacccgggcaccaccgccacgtacctcgagggcaacatgctcatcaccagcgagagcgagacgcagccggtgaaccgcgtggcgtacaacgtcggcgggcagatggccaccaacaaccagagctccaccactgcccccgcgaccggcacgtacaacctccaggaaatcgtgcccggcagcgtgtggatggagagggacgtgtacctccaaggacccatctgggccaagatcccagagacgggggcgcactttcacccctctccggccatgggcggattcggactcaaacacccaccgcccatgatgctcatcaagaacacgcctgtgcccggaaatatcaccagcttctcggacgtgcccgtcagcagcttcatcacccagtacagcaccgggcaggtcaccgtggagatggagtgggagctcaagaaggaaaactccaagaggtggaacccagagatccagtacacaaacaactacaacgacccccagtttgtggactttgccccggacagcaccggggaatacagaaccaccagacctatcggaacccgataccttacccgacccctttaacccattcatgtcgcataccctcaataaa

SEQ ID NO: 1725 - protein, 724 aa, Artificial Sequence
  Description of Artificial Sequence: Synthetic polypeptide
MSFVDHPPDWLEEVGEGLREFLGLEAGPPKPKPNQQHQDQARGLVLPGYNYLGPGNGLDRGEPVNRADEVAREHDISYNEQLEAGDNPYLKYNHADAEFQEKLADDTSFGGNLGKAVFQAKKRVLEPFGLVEEGAKTAPTGKRIDDHFPKRKKARTEEDSKPSTSSDAEAGPSGSQQLQIPAQPASSLGADTMSAGGGGPLGDNNQGADGVGNASGDWHCDSTWMGDRVVTKSTRTWVLPSYNNHQYREIKSGSVDGSNANAYFGYSTPWGYFDFNRFHSHWSPRDWQRLINNYWGFRPRSLRVKIFNIQVKEVTVQDSTTTIANNLTSTVQVFTDDDYQLPYVVGNGTQGCLPAFPPQVFTLPQYGYATLNRDNTENPTERSSFFCLEYFPSKMLRTGNNFEFTYNFEEVPFHSSFAPSQNLFKLANPLVDQYLYRFVSTNNTGGVQFNKNLAGRYANTYKNWFPGPMGRTQGWNLGSGVNRASVSAFATTNRMELEGASYQVPPQPNGMTNNLQGSNTYALENTMIFNSQPANPGTTATYLEGNMLITSESETQPVNRVAYNVGGQMATNNQSSTTAPATGTYNLQEIVPGSVWMERDVYLQGPIWAKIPETGAHFHPSPAMGGFGLKHPPPMMLIKNTPVPGNITSFSDVPVSSFITQYSTGQVTVEMEWELKKENSKRWNPEIQYTNNYNDPQFVDFAPDSTGEYRTTRPIGTRYLTRPL

SEQ ID NO: 1726 - DNA, 2203 bp, Artificial Sequence
  Description of Artificial Sequence: Synthetic polynucleotide
atgtcttttgttgatcaccctccagattggttggaagaagttggtgaaggtcttcgcgagtttttgggccttgaagcgggcccaccgaaaccaaaacccaatcagcagcatcaagatcaagcccgtggtcttgtgctgcctggttataactatctcggacccggaaacggtctcgatcgaggagagcctgtcaacagggcagacgaggtcgcgcgagagcacgacatctcgtacaacgagcagcttgaggcgggagacaacccctacctcaagtacaaccacgcggacgccgagtttcaggagaagctcgccgacgacacatccttcgggggaaacctcggaaaggcagtctttcaggccaagaaaagggttctcgaaccttttggcctggttgaagagggtgctaagacggcccctaccggaaagcggatagacgaccactttccaaaaagaaagaaggctcggaccgaagaggactccaagccttccacctcgtcagacgccgaagctggacccagcggatcccagcagctgcaaatcccagcccaaccagcctcaagtttgggagctgatacaatgtctgcgggaggtggcggcccattgggcgacaataaccaaggtgccgatggagtgggcaatgcctcgggagattggcattgcgattccacgtggatgggggacagagtcgtcaccaagtccacccgaacctgggtgctgcccagctacaacaaccaccagtaccgagagatcaaaagcggctccgtcgacggaagcaacgccaacgcctactttggatacagcaccccctgggggtactttgactttaaccgcttccacagccactggagcccccgagactggcaaagactcatcaacaactactggggcttcagaccccggtccctcagagtcaaaatcttcaacattcaagtcaaagaggtcacggtgcaggactccaccaccaccatcgccaacaacctcacctccaccgtccaagtgtttacggacgacgactaccagctgccctacgtcgtcggcaacgggaccgagggatgcctgccggccttccctccgcaggtctttacgctgccgcagtacggttacgcgacgctgaaccgcgacaacacagaaaatcccaccgagaggagcagcttcttctgcctagagtactttcccagcaagatgctgagaacgggcaacaactttgagtttacctacaactttgaggaggtgcccttccactccagcttcgctcccagtcagaacctgttcaagctggccaacccgctggtggaccagtacttgtaccgcttcgtgagcacaaataacactggcggagtccagttcaacaagaacctggccgggagatacgccaacacctacaaaaactggttcccggggcccatgggccgaacccagggctggaacctgggctccggggtcaaccgcgccagtgtcagcgccttcgccacgaccaataggatggagctcgagggcgcgagttaccaggtgcccccgcagccgaacggcatgaccaacaacctccagggcagcaacacctatgccctggagaacactatgatcttcaacagccagtcggcgaacccgggcaccaccgccacgtacctcgagggcaacatgctcatcaccagcgagagcgagacgcagccggtgaaccgcgtggcgtacaacgtcggcgggcagatggccaccaacaaccagagctccaccactgcccccgcgaccggcacgtacaacctccaggaaatcgtgcccggcagcgtgtggatggagagggacgtgtacctccaaggacccatctgggccaagatcccagagacgggggcgcactttcacccctctccggccatgggcggattcggactcaaacacccaccgcccatgatgctcatcaagaacacgcctgtgcccggaaatatcaccagcttctcggacgtgcccgtcagcagcttcatcacccagtacagcaccgggcaggtcaccgtggagatggagtgggagctcaagaaggaaaactccaagaggtggaacccagagatccagtacacaaacaactacaacgacccccagtttgtggactttgccccggacagcaccggggaatacagaaccaccagacctatcggaacccgataccttacccgacccctttaacccattcatgtcgcataccctcaataaa

SEQ ID NO: 1727 - protein, 724 aa, Artificial Sequence
  Description of Artificial Sequence: Synthetic polypeptide
MSFVDHPPDWLEEVGEGLREFLGLEAGPPKPKPNQQHQDQARGLVLPGYNYLGPGNGLDRGEPVNRADEVAREHDISYNEQLEAGDNPYLKYNHADAEFQEKLADDTSFGGNLGKAVFQAKKRVLEPFGLVEEGAKTAPTGKRIDDHFPKRKKARTEEDSKPSTSSDAEAGPSGSQQLQIPAQPASSLGADTMSAGGGGPLGDNNQGADGVGNASGDWHCDSTWMGDRVVTKSTRTWVLPSYNNHQYREIKSGSVDGSNANAYFGYSTPWGYFDFNRFHSHWSPRDWQRLINNYWGFRPRSLRVKIFNIQVKEVTVQDSTTTIANNLTSTVQVFTDDDYQLPYVVGNGTEGCLPAFPPQVFTLPQYGYATLNRDNTENPTERSSFFCLEYFPSKMLRTGNNFEFTYNFEEVPFHSSFAPSQNLFKLANPLVDQYLYRFVSTNNTGGVQFNKNLAGRYANTYKNWFPGPMGRTQGWNLGSGVNRASVSAFATTNRMELEGASYQVPPQPNGMTNNLQGSNTYALENTMIFNSQSANPGTTATYLEGNMLITSESETQPVNRVAYNVGGQMATNNQSSTTAPATGTYNLQEIVPGSVWMERDVYLQGPIWAKIPETGAHFHPSPAMGGFGLKHPPPMMLIKNTPVPGNITSFSDVPVSSFITQYSTGQVTVEMEWELKKENSKRWNPEIQYTNNYNDPQFVDFAPDSTGEYRTTRPIGTRYLTRPL

SEQ ID NO: 1728 - DNA, 2203 bp, Artificial Sequence
  Description of Artificial Sequence: Synthetic polynucleotide
atgtcttttgttgatcaccctccagattggttggaagaagttggtgaaggtcttcgcgagtttttgggccttgaagcgggcccaccgaaaccaaaacccaatcagcagcatcaagatcaagcccgtggtcttgtgctgcctggttataactatctcggacccggaaacggtctcgatcgaggagagcctgtcaacagggcagacgaggtcgcgcgagagcacgacatctcgtacaacgagcagcttgaggcgggagacaacccctacctcaagtacaaccacgcggacgccgagtttcaggagaagctcgccgacgacacatccttcgggggaaacctcggaaaggcagtctttcaggccaagaaaagggttctcgaaccttttggcctggttgaagagggtgctaagacggcccctaccggaaagcggatagacgaccactttccaaaaagaaagaaggctcggaccgaagaggactccaagccttccacctcgtcagacgccgaagctggacccagcggatcccagcagctgcaaatcccagcccaaccagcctcaagtttgggagctgatacaatgtctgcgggaggtggcggcccattgggcgacaataaccaaggtgccgatggagtgggcaatgcctcgggagattggcattgcgattccacgtggatgggggacagagtcgtcaccaagtccacccgaacctgggtgctgcccagctacaacaaccaccagtaccgagagatcaaaagcggctccgtcgacggaagcaacgccaacgcctactttggatacagcaccccctgggggtactttgactttaaccgcttccacagccactggagcccccgagactggcaaagactcatcaacaactactggggcttcagaccccggtccctcagagtcaaaatcttcaacattcaagtcaaagaggtcacggtgcaggactccaccaccaccatcgccaacaacctcacctccaccgtccaagtgtttacggacgacgactaccagctgccctacgtcgtcggcaacgggaccgagggatgcctgccggccttccctccgcaggtctttacgctgccgcagtacggttacgcgacgctgaaccgcgacaacacagaaaatcccaccgagaggagcagcttcttctgcctagagtactttcccagcaagatgctgagaacgggcaacaactttgagtttacctacaactttgaggaggtgcccttccactccagcttcgctcccagtcagaacctgttcaagctggccaacccgctggtggaccagtacttgtaccgcttcgtgagcacaaataacactggcggagtccagttcaacaagaacctggccgggagatacgccaacacctacaaaaactggttcccggggcccatgggccgaacccagggctggaacctgggctccggggtcaaccgcgccagtgtcagcgccttcgccacgaccaataggatggagctcgagggcgcgagttaccaggtgcccccgcagccgaacggcatgaccaacaacctccagggcagcaacacctatgccctggagaacactatgatcttcaacagccagggggcgaacccgggcaccaccgccacgtacctcgagggcaacatgctcatcaccagcgagagcgagacgcagccggtgaaccgcgtggcgtacaacgtcggcgggcagatggccaccaacaaccagagctccaccactgcccccgcgaccggcacgtacaacctccaggaaatcgtgcccggcagcgtgtggatggagagggacgtgtacctccaaggacccatctgggccaagatcccagagacgggggcgcactttcacccctctccggccatgggcggattcggactcaaacacccaccgcccatgatgctcatcaagaacacgcctgtgcccggaaatatcaccagcttctcggacgtgcccgtcagcagcttcatcacccagtacagcaccgggcaggtcaccgtggagatggagtgggagctcaagaaggaaaactccaagaggtggaacccagagatccagtacacaaacaactacaacgacccccagtttgtggactttgccccggacagcaccggggaatacagaaccaccagacctatcggaacccgataccttacccgacccctttaacccattcatgtcgcataccctcaataaa

SEQ ID NO: 1729 - protein, 724 aa, Artificial Sequence
  Description of Artificial Sequence: Synthetic polypeptide
MSFVDHPPDWLEEVGEGLREFLGLEAGPPKPKPNQQHQDQARGLVLPGYNYLGPGNGLDRGEPVNRADEVAREHDISYNEQLEAGDNPYLKYNHADAEFQEKLADDTSFGGNLGKAVFQAKKRVLEPFGLVEEGAKTAPTGKRIDDHFPKRKKARTEEDSKPSTSSDAEAGPSGSQQLQIPAQPASSLGADTMSAGGGGPLGDNNQGADGVGNASGDWHCDSTWMGDRVVTKSTRTWVLPSYNNHQYREIKSGSVDGSNANAYFGYSTPWGYFDFNRFHSHWSPRDWQRLINNYWGFRPRSLRVKIFNIQVKEVTVQDSTTTIANNLTSTVQVFTDDDYQLPYVVGNGTEGCLPAFPPQVFTLPQYGYATLNRDNTENPTERSSFFCLEYFPSKMLRTGNNFEFTYNFEEVPFHSSFAPSQNLFKLANPLVDQYLYRFVSTNNTGGVQFNKNLAGRYANTYKNWFPGPMGRTQGWNLGSGVNRASVSAFATTNRMELEGASYQVPPQPNGMTNNLQGSNTYALENTMIFNSQGANPGTTATYLEGNMLITSESETQPVNRVAYNVGGQMATNNQSSTTAPATGTYNLQEIVPGSVWMERDVYLQGPIWAKIPETGAHFHPSPAMGGFGLKHPPPMMLIKNTPVPGNITSFSDVPVSSFITQYSTGQVTVEMEWELKKENSKRWNPEIQYTNNYNDPQFVDFAPDSTGEYRTTRPIGTRYLTRPL

SEQ ID NO: 1730 - DNA, 2194 bp, Artificial Sequence
  Description of Artificial Sequence: Synthetic polynucleotide
atgtcttttgttgatcaccctccagattggttggaagaagttggtgaaggtcttcgcgagtttttgggccttgaagcgggcccaccgaaaccaaaacccaatcagcagcatcaagatcaagcccgtggtcttgtgctgcctggttataactatctcggacccggaaacggtctcgatcgaggagagcctgtcaacagggcagacgaggtcgcgcgagagcacgacatctcgtacaacgagcagcttgaggcgggagacaacccctacctcaagtacaaccacgcggacgccgagtttcaggagaagctcgccgacgacacatccttcgggggaaacctcggaaaggcagtctttcaggccaagaaaagggttctcgaaccttttggcctggttgaagagggtgctaagacggcccctaccggaaagcggatagacgaccactttccaaaaagaaagaaggctcggaccgaagaggactccaagccttccacctcgtcagacgccgaagctggacccagcggatcccagcagctgcaaatcccagcccaaccagcctcaagtttgggagctgatacaatgtctgcgggaggtggcggcccattgggcgacaataaccaaggtgccgatggagtgggcaatgcctcgggagattggcattgcgattccacgtggatgggggacagagtcgtcaccaagtccacccgaacctgggtgctgcccagctacaacaaccaccagtaccgagagatcaaaagcggctccgtcgacggaagcaacgccaacgcctactttggatacagcaccccctgggggtactttgactttaaccgcttccacagccactggagcccccgagactggcaaagactcatcaacaactactggggcttcagaccccggtccctcagagtcaaaatcttcaacattcaagtcaaagaggtcacggtgcaggactccaccaccaccatcgccaacaacctcacctccaccgtccaagtgtttacggacgacgactaccagctgccctacgtcgtcggcaacgggaccgagggatgcctgccggccttccctccgcaggtctttacgctgccgcagtacggttacgcgacgctgaaccgcgacaacacagaaaatcccaccgagaggagcagcttcttctgcctagagtactttcccagcaagatgctgagaacgggcaacaactttgagtttacctacaactttgaggaggtgcccttccactccagcttcgctcccagtcagaacctgttcaagctggccaacccgctggtggaccagtacttgtaccgcttcgtgagcacaaataacactggcggagtccagttcaacaagaacctggccgggagatacgccaacacctacaaaaactggttcccggggcccatgggccgaacccagggctggaacctgggctccggggtcaaccgcgccagtgtcagcgccttcgccacgaccaataggatggagctcgagggcgcgagttaccaggtgcccccgcagccgaacggcatgaccaacaacctccagggcagcaacacctatgccctggagaacactatgatcttcgggaagcaaggctcagagaaaacaaatgtggacattgaaaaggtcatgatcaccagcgagagcgagacgcagccggtgaaccgcgtggcgtacaacgtcggcgggcagatggccaccaacaaccagagctccaccactgcccccgcgaccggcacgtacaacctccaggaaatcgtgcccggcagcgtgtggatggagagggacgtgtacctccaaggacccatctgggccaagatcccagagacgggggcgcactttcacccctctccggccatgggcggattcggactcaaacacccaccgcccatgatgctcatcaagaacacgcctgtgcccggaaatatcaccagcttctcggacgtgcccgtcagcagcttcatcacccagtacagcaccgggcaggtcaccgtggagatggagtgggagctcaagaaggaaaactccaagaggtggaacccagagatccagtacacaaacaactacaacgacccccagtttgtggactttgccccggacagcaccggggaatacagaaccaccagacctatcggaacccgataccttacccgacccctttaacccattcatgtcgcataccctcaataaa

SEQ ID NO: 1731 - protein, 721 aa, Artificial Sequence
  Description of Artificial Sequence: Synthetic polypeptide
MSFVDHPPDWLEEVGEGLREFLGLEAGPPKPKPNQQHQDQARGLVLPGYNYLGPGNGLDRGEPVNRADEVAREHDISYNEQLEAGDNPYLKYNHADAEFQEKLADDTSFGGNLGKAVFQAKKRVLEPFGLVEEGAKTAPTGKRIDDHFPKRKKARTEEDSKPSTSSDAEAGPSGSQQLQIPAQPASSLGADTMSAGGGGPLGDNNQGADGVGNASGDWHCDSTWMGDRVVTKSTRTWVLPSYNNHQYREIKSGSVDGSNANAYFGYSTPWGYFDFNRFHSHWSPRDWQRLINNYWGFRPRSLRVKIFNIQVKEVTVQDSTTTIANNLTSTVQVFTDDDYQLPYVVGNGTEGCLPAFPPQVFTLPQYGYATLNRDNTENPTERSSFFCLEYFPSKMLRTGNNFEFTYNFEEVPFHSSFAPSQNLFKLANPLVDQYLYRFVSTNNTGGVQFNKNLAGRYANTYKNWFPGPMGRTQGWNLGSGVNRASVSAFATTNRMELEGASYQVPPQPNGMTNNLQGSNTYALENTMIFGKQGSEKTNVDIEKVMITSESETQPVNRVAYNVGGQMATNNQSSTTAPATGTYNLQEIVPGSVWMERDVYLQGPIWAKIPETGAHFHPSPAMGGFGLKHPPPMMLIKNTPVPGNITSFSDVPVSSFITQYSTGQVTVEMEWELKKENSKRWNPEIQYTNNYNDPQFVDFAPDSTGEYRTTRPIGTRYLTRPL

SEQ ID NO: 1732 - protein, 519 aa, Artificial Sequence
  Description of Artificial Sequence: Synthetic polypeptide
DGVGSSSGNWHCDSTWLGDRVITTSTRTWALPTYNNHLYKQISNGTSGGATNDNTYFGYSTPWGYFDFNRFHCHFSPRDWQRLINNNWGFRPKRLSFKLFNIQVKEVTQNEGTKTIANNLTSTIQVFTDSEYQLPYVLGSAHQGCLPPFPADVFMIPQYGYLTLNNGSQAVGRSSFYCLEYFPSQMLRTGNNFQFTYTFEDVPFHSSYAHSQSLDRLMNPLIDQYLYYLSRTQTTGGTANTQTLGFSQGGPNTMANQAKNWLPGPCYRQQRVSTTTGQNNNSNFAWTAGTKYHLNGRNSLANPGIAMATHKDDEERFFPSNGILIFGKQNAARDNADYSDVMLTSEEEIKTTNPVATEEYGIVADNLQQQNTAPQIGTVNSQGALPGMVWQNRDVYLQGPIWAKIPHTDGNFHPSPLMGGFGLKHPPPQILIKNTPVPADPPTTFNQSKLNSFITQYSTGQVSVEIEWELQKENSKRWNPEIQYTSNYYKSTSVDFAVNTEGVYSEPRPIGTRYLTRNL

SEQ ID NO: 1733 - protein, 738 aa, Artificial Sequence
  Description of Artificial Sequence: Synthetic polypeptide
MAADGYLPDWLEDNLSEGIREWWALQPGAPKPKANQQHQDNARGLVLPGYKYLGPGNGLDKGEPVNAADAAALEHDKAYDQQLKAGDNPYLKYNHADAEFQERLKEDTSFGGNLGRAVFQAKKRLLEPLGLVEEAAKTAPGKKRPVEPSPQRSPDSSTGIGKKGQQPARKRLNFGQTGDSESVPDPQPLGEPPAAPSGVGPNTMAAGGGAPMADNNEGADGVGSSSGNWHCDSTWLGDRVITTSTRTWALPTYNNHLYKQISNGTSGGATNDNTYFGYSTPWGYFDFNRFHCHFSPRDWQRLINNNWGFRPKRLSFKLFNIQVKEVTQNEGTKTIANNLTSTIQVFTDSEYQLPYVLGSAHQGCLPPFPADVFMIPQYGYLTLNNGSQAVGRSSFYCLEYFPSQMLRTGNNFQFTYTFEDVPFHSSYAHSQSLDRLMNPLIDQYLYYLSRTQTTGGTANTQTLGFSQGGPNTMANQAKNWLPGPCYRQQRVSTTTGQNNNSNFAWTAGTKYHLNGRNSLANPGIAMATHKDDEERFFPSNGILIFGKQNAARDNADYSDVMLTSEEEIKTTNPVATEEYGIVADNLQQQNTAPQIGTVNSQGALPGMVWQNRDVYLQGPIWAKIPHTDGNFHPSPLMGGFGLKHPPPQILIKNTPVPADPPTTFNQSKLNSFITQYSTGQVSVEIEWELQKENSKRWNPEIQYTSNYYKSTSVDFAVNTEGVYSEPRPIGTRYLTRNL

SEQ ID NO: 1734 - protein, 725 aa, Artificial Sequence
  Description of Artificial Sequence: Synthetic polypeptide
MAADGYLPDWLEDNLSEGIREWWALQPGAPKPKANQQHQDNARGLVLPGYKYLGPGNGLDKGEPVNAADAAALEHDKAYDQQLKAGDNPYLKYNHADAEFQERLKEDTSFGGNLGRAVFQAKKRLLEPLGLVEEAAKTAPTGKRIDDHFPKRKKARTEEDSKPSTSSDAEAGPSGSQQLQIPAQPASSLGADTMSAGGGGPLGDNNQGADGVGNASGDWHCDSTWMGDRVVTKSTRTWVLPSYNNHQYREIKSGSVDGSNANAYFGYSTPWGYFDFNRFHSHWSPRDWQRLINNYWGFRPRSLRVKIFNIQVKEVTVQDSTTTIANNLTSTVQVFTDDDYQLPYVVGNGTEGCLPAFPPQVFTLPQYGYATLNRDNTENPTERSSFFCLEYFPSKMLRTGNNFEFTYNFEEVPFHSSFAPSQNLFKLANPLVDQYLYRFVSTNNTGGVQFNKNLAGRYANTYKNWFPGPMGRTQGWNLGSGVNRASVSAFATTNRMELEGASYQVPPQPNGMTNNLQGSNTYALENTMIFNSQPANPGTTATYLEGNMLITSESETQPVNRVAYNVGGQMATNNQSSTTAPATGTYNLQEIVPGSVWMERDVYLQGPIWAKIPETGAHFHPSPAMGGFGLKHPPPMMLIKNTPVPGNITSFSDVPVSSFITQYSTGQVTVEMEWELKKENSKRWNPEIQYTNNYNDPQFVDFAPDSTGEYRTTRPIGTRYLTRPL

SEQ ID NO: 1735 - protein, 736 aa, Artificial Sequence
  Description of Artificial Sequence: Synthetic polypeptide
MAADGYLPDWLEDNLSEGIREWWALKPGAPKPKANQQKQDDGRGLVLPGYKYLGPFNGLDKGEPVNAADAAALEHDKAYDQQLQAGDNPYLRYNHADAEFQERLQEDTSFGGNLGRAVFQAKKRVLEPLGLVEEGAKTAPGKKRPVDQSPQEPDSSSGVGKSGKQPARKRLNFGQTGDSESVPDPQPLGEPPAAPTSLGSNTMASGGGAPMADNNEGADGVGNSSGNWHCDSQWLGDRVITTSTRTWALPTYNNHLYKQISSQSGASNDNHYFGYSTPWGYFDFNRFHCHFSPRDWQRLINNNWGFRPKKLSFKLFNIQVKEVTQNDGTTTIANNLTSTVQVFTDSEYQLPYVLGSAHQGCLPPFPADVFMVPQYGYLTLNNGSQAVGRSSFYCLEYFPSQMLRTGNNFQFSYTFEDVPFHSSYAHSQSLDRLMNPLIDQYLYYLNRTQGTTSGTTNQSRLLFSQAGPQSMSLQARNWLPGPCYRQQRLSKTANDNNNSNFPWTAASKYHLNGRDSLVNPGPAMASHKDDEEKFFPMHGNLIFGKEGTTASNAELDNVMITDEEEIRTTNPVATEQYGTVANNLQSSNTAPTTRTVNDQGALPGMVWQDRDVYLQGPIWAKIPHTDGHFHPSPLMGGFGLKHPPPQIMIKNTPVPANPPTTFSPAKFASFITQYSTGQVSVEIEWELQKENSKRWNPEIQYTSNYNKSVNVDFTVDTNGVYSEPRPIGTRYLTRNL

SEQ ID NO: 1736 - protein, 735 aa, Artificial Sequence
  Description of Artificial Sequence: Synthetic polypeptide
MSFVDHPPDWLEEVGEGLREFLGLEAGPPKPKPNQQHQDQARGLVLPGYNYLGPGNGLDRGEPVNRADEVAREHDISYNEQLEAGDNPYLKYNHADAEFQEKLADDTSFGGNLGKAVFQAKKRVLEPFGLVEEGAKTAPGKKRPVDQSPQEPDSSSGVGKSGKQPARKRLNFGQTGDSESVPDPQPLGEPPAAPTSLGSNTMASGGGAPMADNNEGADGVGNSSGNWHCDSQWLGDRVITTSTRTWALPTYNNHLYKQISSQSGASNDNHYFGYSTPWGYFDFNRFHCHFSPRDWQRLINNNWGFRPKKLSFKLFNIQVKEVTQNDGTTTIANNLTSTVQVFTDSEYQLPYVLGSAHQGCLPPFPADVFMVPQYGYLTLNNGSQAVGRSSFYCLEYFPSQMLRTGNNFQFSYTFEDVPFHSSYAHSQSLDRLMNPLIDQYLYYLNRTQGTTSGTTNQSRLLFSQAGPQSMSLQARNWLPGPCYRQQRLSKTANDNNNSNFPWTAASKYHLNGRDSLVNPGPAMASHKDDEEKFFPMHGNLIFGKEGTTASNAELDNVMITDEEEIRTTNPVATEQYGTVANNLQSSNTAPTTRTVNDQGALPGMVWQDRDVYLQGPIWAKIPHTDGHFHPSPLMGGFGLKHPPPQIMIKNTPVPANPPTTFSPAKFASFITQYSTGQVSVEIEWELQKENSKRWNPEIQYTSNYNKSVNVDFTVDTNGVYSEPRPIGTRYLTRPL

SEQ ID NO: 1737 - protein, 736 aa, Artificial Sequence
  Description of Artificial Sequence: Synthetic polypeptide
MAADGYLPDWLEDNLSEGIREWWALKPGAPKPKANQQKQDDGRGLVLPGYKYLGPFNGLDKGEPVNAADAAALEHDKAYDQQLQAGDNPYLRYNHADAEFQERLQEDTSFGGNLGRAVFQAKKRVLEPLGLVEEGAKTAPGKKRPVEPSPQRSPDSSTGIGKKGQQPARKRLNFGQTGDSESVPDPQPLGEPPAAPSGVGPNTMAAGGGAPMADNNEGADGVGSSSGNWHCDSTWLGDRVITTSTRTWALPTYNNHLYKQISSQSGASNDNHYFGYSTPWGYFDFNRFHCHFSPRDWQRLINNNWGFRPKRLSFKLFNIQVKEVTQNEGTKTIANNLTSTIQVFTDSEYQLPYVLGSAHQGCLPPFPADVFMIPQYGYLTLNNGSQAVGRSSFYCLEYFPSQMLRTGNNFQFTYTFEDVPFHSSYAHSQSLDRLMNPLIDQYLYYLSRTQTTGGTANTQTLGFSQGGPNTMANQAKNWLPGPCYRQQRVSTTTGQNNNSNFAWTAGTKYHLNGRNSLANPGIAMATHKDDEERFFPSNGILIFGKQGTTASNAELDNVMITDEEEIKTTNPVATEEYGIVADNLQQQNTAPQIGTVNSQGALPGMVWQNRDVYLQGPIWAKIPHTDGNFHPSPLMGGFGLKHPPPQILIKNTPVPADPPTTFNQSKLNSFITQYSTGQVSVEIEWELQKENSKRWNPEIQYTSNYNKSVNVDFTVDTNGVYSEPRPIGTRYLTRNL

SEQ ID NO: 1738 - protein, 736 aa, Artificial Sequence
  Description of Artificial Sequence: Synthetic polypeptide
MAADGYLPDWLEDNLSEGIREWWALKPGAPKPKANQQKQDDGRGLVLPGYKYLGPFNGLDKGEPVNAADAAALEHDKAYDQQLQAGDNPYLRYNHADAEFQERLQEDTSFGGNLGRAVFQAKKRVLEPLGLVEEGAKTAPGKKRPVEPSPQRSPDSSTGIGKKGQQPARKRLNFGQTGDSESVPDPQPLGEPPAAPSGVGPNTMAAGGGAPMADNNEGADGVGSSSGNWHCDSTWLGDRVITTSTRTWALPTYNNHLYKQISSQSGASNDNHYFGYSTPWGYFDFNRFHCHFSPRDWQRLINNNWGFRPKRLSFKLFNIQVKEVTQNEGTKTIANNLTSTIQVFTDSEYQLPYVLGSAHQGCLPPFPADVFMIPQYGYLTLNNGSQAVGRSSFYCLEYFPSQMLRTGNNFQFTYTFEDVPFHSSYAHSQSLDRLMNPLIDQYLYYLSRTQTTGGTANTQTLGFSQGGPNTMANQAKNWLPGPCYRQQRVSTTTGQNNNSNFAWTAGTKYHLNGRNSLANPGIAMATHKDDEERFFPSNGILIFGKQNAARDNADYSDVMLTSEEEIKTTNPVATEEYGIVADNLQQQNTAPQIGTVNSQGALPGMVWQNRDVYLQGPIWAKIPHTDGNFHPSPLMGGFGLKHPPPQILIKNTPVPADPPTTFNQSKLNSFITQYSTGQVSVEIEWELQKENSKRWNPEIQYTSNYYKSTSVDFAVNTEGVYSEPRPIGTRYLTRNL

SEQ ID NO: 1739 - protein, 736 aa, Artificial Sequence
  Description of Artificial Sequence: Synthetic polypeptide
MAADGYLPDWLEDNLSEGIREWWDLKPGAPKPKANQQKQDDGRGLVLPGYKYLGPFNGLDKGEPVNAADAAALEHDKAYDQQLKAGDNPYLRYNHADAEFQERLQEDTSFGGNLGRAVFQAKKRVLEPLGLVEEGAKTAPGKKRPVEQSPQEPDSSSGIGKTGQQPAKKRLNFGQTGDTESVPDPQPLGEPPAAPSGLGPNTMASGGGAPMADNNEGADGVGNSSGNWHCDSTWLGDRVITTSTRTWALPTYNNHLYKQISNGTSGGSTNDNTYFGYSTPWGYFDFNRFHCHFSPRDWQRLINNNWGFRPKRLNFKLFNIQVKEVTTNEGTKTIANNLTSTVQVFTDSEYQLPYVLGSAHQGCLPPFPADVFMVPQYGYLTLNNGSQALGRSSFYCLEYFPSQMLRTGNNFQFSYTFEDVPFHSSYAHSQSLDRLMNPLIDQYLYYLVRTQTTGTGGTQTLAFSQAGPSSMASQARNWVPGPSYRQQRVSTTTNQNNNSNFAWTGAAKFKLNGRDSLMNPGVAMASHKDDEDRFFPSSGVLIFGKQGAGNDGVDYSQVLITDEEEIKATNPVATEEYGAVAINNQAANTQAQTGLVHNQGVIPGMVWQNRDVYLQGPIWAKIPHTDGNFHPSPLMGGFGLKHPPPQILIKNTPVPADPPLTFNQAKLNSFITQYSTGQVSVEIEWELQKENSKRWNPEIQYTSNYYKSTNVDFAVNTEGVYSEPRPIGTRYLTRNL

SEQ ID NO: 1740 - DNA, 3695 bp, Artificial Sequence
  Description of Artificial Sequence: Synthetic polynucleotide
ctctttgcgcttgcgttttcccttgtccagatagcccagtagctgacattcatccggggtcagcaccgtttctgcggactggctttctacgtgaaaaggatctaggtgaagatcctttttgataatctcatgcctgacatttatattccccagaacatcaggttaatggcgtttttgatgtcattttcgcggtggctgagatcagccacttcttccccgataacggagaccggcacactggccatatcggtggtcatcatgcgccagctttcatccccgatatgcaccaccgggtaaagttcacgggagactttatctgacagcagacgtgcactggccagggggatcaccatccgtcgccccggcgtgtcaataatatcactctgtacatccacaaacagacgataacggctctctcttttataggtgtaaaccttaaactgccgtacgtataggctgcgcaactgttgggaagggcgatcggtgcgggcctcttcgctattacgccagctggcgaaagggggatgtgctgcaaggcgattaagttgggtaacgccagggttttcccagtcacgacgttgtaaaacgacggccagtgaattgtaatacgactcactatagggcgaattgaatttagcggccgcgaattcgcccttatgatatctggtgggaggagggcaagatgacggccaaggtcgtggagtccgccaaggccattctcggcggcagcaaagtgcgcgtggaccaaaagtgcaagtcgtccgcccagatcgatcccactcccgtcattgtcacctccaacaccaacatgtgcgccgtgattgacgggaacagcaccaccttcgagcaccagcagccgttgcaggaccggatgttcaaatttgaacttacccgccgtctggagcatgactttggcaaggtgacaaagcaggaagtcaaagagttcttccgctgggcgcaggatcacgtgaccgaggtggcgcatgagttccacgtcagaaagggtggagccaacaagagacccgcccccgatgacgctgataaaagcgagcccaagcgggcctgcccctcagtcgcagatccatcgacgtcagacgcggaaggagctccggtggactttgccgacaggtaccaaaacaaatgttctcgtcacgcgggcatgcttcagatgctgtttccctgcaagacatgcgagagaatgaatcagaatttcaacatttgcttcacgcacgggaccagggactgttcggagtgcttccccggcgtgtcagaatctcaaccggtcgtcagaaaaaggacgtatcggaaactctgtgccattcatcatctgctggggagggctcccgagattgcttgctcggcctgcgatctggtcaacgtggacctggatgactgtgtctctgagcaataaatgacttaaaccaggtatggctgccgatggttatcttccagattggctcgaggacaacctctctgagggcattcgcgagtggtgggacttgaaacctggagccccgaaacccaaagccaaccagcaaaagcaggacgacggccggggtctggtgcttcctggctacaagtacctcggacccttcaacggactcgacaagggggagcccgtcaacgcggcggacgcagcggccctcgagcacgacaaggcctacgaccagcagctcaaagcgggtgacaatccgtacctgcggtataaccacgccgacgccgagtttcaggagcgtctgcaagaagatacgtcttttgggggcaacctcgggcgagcagtcttccaggccaagaagcgggttctcgaacctctcggtctggttgaggaaggcgctaagacggctcctggaaagaagagaccggtagagcagtcaccccaagaaccagactcctcatcgggcatcggcaagacaggccagcagcccgctaaaaagagactcaattttggtcagactggcgacacagagtcagtccccgacccacaacctctcggagaacctccagcagccccctcaggtctgggacctaatacaatggcttcaggcggtggcgctccaatggcagacaataacgaaggcgccgacggagtgggtaattcctcgggaaattggcattgcgattccacatggctgggggacagagtcatcaccaccagcacccgaacctgggccctgcccacctacaacaaccacctctacaagcaaatctccaacggcacctcgggaggaagcaccaacgacaacacctactttggctacagcaccccctgggggtattttgacttcaacagattccactgccacttttcaccacgtgactggcagcgactcatcaacaacaattggggattccggcccaagagactcaacttcaagctcttcaacatccaggtcaaggaagtcacgacgaacgaaggcaccaagaccatcgccaataatctcaccagcaccgtgcaggtctttacggactcggagtaccagctaccgtacgtgctaggatcagctcaccagggatgtctgcctccgttcccggcggacgtcttcatggttcctcagtacggttatctaactctgaacaatggcagccaggccctgggacgttcctccttctactgcctggagtatttcccatcgcagatgctgagaaccggcaacaactttcagttcagctacaccttcgaggacgtgcctttccacagcagctacgcgcacagccaaagcctggacaggctgatgaatcccctcatcgaccagtacctgtattacctggtcagaacgcagacaaccgggactggagggacgcagactctggcattcagccaagcaggccctagctcaatggccagccaggctagaaactgggtgcccggaccgagctaccggcagcagcgcgtctccacgacaaccaaccagaacaacaacagcaactttgcctggacgggagctgccaaatttaaactgaacggccgagactctctaatgaaccccggcgtggccatggcttcacacaaggatgacgaggaccgcttcttcccttctagcggggtcctgattttcggcaagcaaggagccgggaatgatggagtggattacagccaagtgctgattacagatgaggaagaaatcaaggctaccaaccccgtggcaacagaggaatatggagcagtggccatcaacaaccaggccgctaatacgcaggcgcagaccggactcgtgcacaaccagggggtgattcccggcatggtgtggcagaacagagacgtgtacctgcagggtcccatctgggccaaaattcctcacacggacggcaactttcacccgtctcccctgatgggcggctttggactgaagcacccgcctcctcaaattctcatcaagaacacaccggttccagcggacccgccgcttaccttcaaccaggccaagctgaactctttcatcacgcagtacagcaccggacaggtcagcgtggaaatcgagtgggagctgcagaaagaaaacagcaaacgctggaatccagagattcagtacacttccaactactacaaatctacaaatgtggactttgctgtcaacacggaaggagtgtatagcgagcctcgccccattggcacccgttacctcacccgcaacctgtaattgcctgttaatcaataaaccggttaattcgtttcagtaaggaagaattcgtttaaa

SEQ ID NO: 1741 - protein, 736 aa, Artificial Sequence; identical to SEQ ID NO: 507
  Description of Artificial Sequence: Synthetic polypeptide

SEQ ID NO: 1742 - protein, 736 aa, Artificial Sequence
  Description of Artificial Sequence: Synthetic polypeptide
MAADGYLPDWLEDNLSEGIREWWDLKPGAPKPKANQQKQDDGRGLVLPGYKYLGPFNGLDKGEPVNAADAAALEHDKAYDQQLKAGDNPYLRYNHADAEFQERLQEDTSFGGNLGRAVFQAKKRVLEPLGLVEEGAKTAPGKKRPVEQSPQEPDSSSGIGKTGQQPAKKRLNFGQTGDTESVPDPQPLGEPPAAPSGLGPNTMASGGGAPMADNNEGADGVGNSSGNWHCDSTWLGDRVITTSTRTWALPTYNNHLYKQISNGTSGGSTNDNTYFGYSTPWGYFDFNRFHCHFSPRDWQRLINNNWGFRPKRLNFKLFNIQVKEVTTNEGTKTIANNLTSTVQVFTDSEYQLPYVLGSAHQGCLPPFPADVFMVPQYGYLTLNNGSQALGRSSFYCLEYFPSQMLRTGNNFQFSYTFEDVPFHSSYAHSQSLDRLMNPLIDQYLYYLVRTQTTGTGGTQTLAFSQAGPSNMASQARNWVPGPSYRQQRVSTTTNQNNNSNFAWTGAAKFKLNGRDSLMNPGVAMASHKDDEDRFFPSSGVLIFGKQGAGNDGVDYSQVLITDEEEIKATNPVATEEYGAVAINNQAANTQAQTGLVHNQGVIPGMVWQNRDVYLQGPIWAKIPHTDGNFHPSPLMGGFGLKHPPPQILIKNTPVPADPPLTFNQAKLNSFITQYSTGQVSVEIEWELQKENSKRWNPEIQYTSNYYKSTNVDFAVNTEGVYSEPRPIGTRYLTRNL

SEQ ID NO: 1743 - protein, 738 aa, Artificial Sequence; identical to SEQ ID NO: 1437
  Description of Artificial Sequence: Synthetic polypeptide

SEQ ID NO: 1744 - protein, 736 aa, Artificial Sequence
  Description of Artificial Sequence: Synthetic polypeptide
MAADGYLPDWLEDNLSEGIREWWALQPGAPKPKANQQHQDNARGLVLPGYKYLGPGNGLDKGEPVNAADAAALEHDKAYDQQLKAGDNPYLKYNHADAEFQERLKEDTSFGGNLGRAVFQAKKRILEPLGLVEEAAKTAPGKKRPVDQSPQEPDSSSGVGKSGKQPARKRLNFGQTGDSESVPDPQPLGEPPAAPTSLGSNTMASGGGAPMADNNEGADGVGNSSGNWHCDSQWLGDRVITTSTRTWALPTYNNHLYKQISSQSGASNDNHYFGYSTPWGYFDFNRFHCHFSPRDWQRLINNNWGFRPKKLSFKLFNIQVKEVTQNDGTTTIANNLTSTVQVFTDSEYQLPYVLGSAHQGCLPPFPADVFMVPQYGYLTLNNGSQAVGRSSFYCLEYFPSQMLRTGNNFQFSYTFEDVPFHSSYAHSQSLDRLMNPLIDQYLYYLNRTQGTTSGTTNQSRLLFSQAGPQSMSLQARNWLPGPCYRQQRLSKTANDNNNSNFPWTAASKYHLNGRDSLVNPGPAMASHKDDEEKFFPMHGNLIFGKEGTTASNAELDNVMITDEEEIRTTNPVATEQYGTVANNLQSSNTAPTTRTVNDQGALPGMVWQDRDVYLQGPIWAKIPHTDGHFHPSPLMGGFGLKHPPPQIMIKNTPVPANPPTTFSPAKFASFITQYSTGQVSVEIEWELQKENSKRWNPEIQYTSNYNKSVNVDFTVDTNGVYSEPRPIGTRYLTRPL

SEQ ID NO: 1745 - protein, 736 aa, Artificial Sequence
  Description of Artificial Sequence: Synthetic polypeptide
MAADGYLPDWLEDNLSEGIREWWALQPGAPKPKANQQHQDNARGLVLPGYKYLGPGNGLDKGEPVNAADAAALEHDKAYDQQLKAGDNPYLKYNHADAEFQERLKEDTSFGGNLGRAVFQAKKRLLEPLGLVEEAAKTAPGKKRPVDQSPQEPDSSSGVGKSGKQPARKRLNFGQTGDSESVPDPQPLGEPPAAPTSLGSNTMASGGGAPMADNNEGADGVGNSSGNWHCDSQWLGDRVITTSTRTWALPTYNNHLYKQISSQSGASNDNHYFGYSTPWGYFDFNRFHCHFSPRDWQRLINNNWGFRPKKLSFKLFNIQVKEVTQNDGTTTIANNLTSTVQVFTDSEYQLPYVLGSAHQGCLPPFPADVFMVPQYGYLTLNNGSQAVGRSSFYCLEYFPSQMLRTGNNFQFSYTFEDVPFHSSYAHSQSLDRLMNPLIDQYLYYLNRTQGTTSGTTNQSRLLFSQAGPQSMSLQARNWLPGPCYRQQRLSKVANDNNNSNFPWTAASKYHLNGRDSLVNPGPAMASHKDDEEKFFPMHGNLIFGKEGTTASNAELDNVMITDEEEIRTTNPVATEQYGTVANNLQSSNTAPTTRTVNDQGALPGMVWQDRDVYLQGPIWAKIPHTDGHFHPSPLMGGFGLKHPPPQIMIKNTPVPANPPTTFVPAKFASFITQYSTGQVSVEIEWELQKENSKRWNPEIQYTSNYNKSVNVDFTVDTNGVYSEPRPIGTRYLTRPL

SEQ ID NO: 1746 - protein, 736 aa, Artificial Sequence
  Description of Artificial Sequence: Synthetic polypeptide
  misc_feature (168)..(168): Xaa can be any naturally occurring amino acid
  misc_feature (204)..(204): Xaa can be any naturally occurring amino acid
  misc_feature (266)..(266): Xaa can be any naturally occurring amino acid
  misc_feature (311)..(311): Xaa can be any naturally occurring amino acid
  misc_feature (411)..(411): Xaa can be any naturally occurring amino acid
  misc_feature (460)..(460): Xaa can be any naturally occurring amino acid
  misc_feature (493)..(493): Xaa can be any naturally occurring amino acid
  misc_feature (562)..(562): Xaa can be any naturally occurring amino acid
  misc_feature (576)..(576): Xaa can be any naturally occurring amino acid
  misc_feature (587)..(587): Xaa can be any naturally occurring amino acid
  misc_feature (609)..(609): Xaa can be any naturally occurring amino acid
MAADGYLPDWLEDNLSEGIREWWDLKPGAPKPKANQQKQDDGRGLVLPGYKYLGPFNGLDKGEPVNAADAAALEHDKAYDQQLKAGDNPYLRYNHADAEFQERLQEDTSFGGNLGRAVFQAKKRVLEPLGLVEEGAKTAPGKKRPVEQSPQEPDSSSGIGKKGQQPAXKRLNFGQTGDSESVPDPQPLGEPPAAPSGVGSNTMXAGGGAPMADNNEGADGVGNASGNWHCDSTWLGDRVITTSTRTWALPTYNNHLYKQISSQSGXSTNDNTYFGYSTPWGYFDFNRFHCHFSPRDWQRLINNNWGFRPKXLNFKLFNIQVKEVTTNDGTTTIANNLTSTVQVFTDSEYQLPYVLGSAHQGCLPPFPADVFMIPQYGYLTLNNGSQAVGRSSFYCLEYFPSQMLRTGNNFXFSYTFEDVPFHSSYAHSQSLDRLMNPLIDQYLYYLSRTQTTSGTAGNRXLQFSQAGPSSMANQAKNWLPGPCYRQQRVSKTXNQNNNSNFAWTGATKYHLNGRDSLVNPGPAMATHKDDEDKFFPMSGVLIFGKQGAGNSNVDLDNVMITXEEEIKTTNPVATEXYGTVATNLQSXNTAPATGTVNSQGALPGMVWQXRDVYLQGPIWAKIPHTDGHFHPSPLMGGFGLKHPPPQILIKNTPVPANPPTTFSPAKFASFITQYSTGQVSVEIEWELQKENSKRWNPEIQYTSNYNKSTNVDFAVDTNGVYSEPRPIGTRYLTRNL

SEQ ID NO: 1747 - DNA, 2208 bp, Artificial Sequence
  Description of Artificial Sequence: Synthetic polynucleotide
  misc_feature (502)..(504): n is a, c, g, or t
  misc_feature (610)..(612): n is a, c, g, or t
  misc_feature (796)..(798): n is a, c, g, or t
  misc_feature (931)..(933): n is a, c, g, or t
  misc_feature (1231)..(1233): n is a, c, g, or t
  misc_feature (1378)..(1380): n is a, c, g, or t
  misc_feature (1477)..(1479): n is a, c, g, or t
  misc_feature (1684)..(1686): n is a, c, g, or t
  misc_feature (1726)..(1728): n is a, c, g, or t
  misc_feature (1759)..(1761): n is a, c, g, or t
  misc_feature (1825)..(1827): n is a, c, g, or t
atggctgccgatggttatcttccagattggctcgaggacaacctctctgagggcattcgcgagtggtgggacttgaaacctggagccccgaaacccaaagccaaccagcaaaagcaggacgacggccggggtctggtgcttcctggctacaagtacctcggacccttcaacggactcgacaagggggagcccgtcaacgcggcggacgcagcggccctcgagcacgacaaggcctacgaccagcagctcaaagcgggtgacaatccgtacctgcggtataaccacgccgacgccgagtttcaggagcgtctgcaagaagatacgtcttttgggggcaacctcgggcgagcagtcttccaggccaagaagcgggttctcgaacctctcggtctggttgaggaaggcgctaagacggctcctggaaagaagagaccggtagagcaatcaccccaggaaccagactcctcttcgggcatcggcaagaaaggccagcagcccgcgnnnaagagactcaactttgggcagacaggcgactcagagtcagtgcccgaccctcaaccactcggagaaccccccgcagccccctctggtgtgggatctaatacaatgnnngcaggcggtggcgctccaatggcagacaataacgaaggcgccgacggagtgggtaacgcctcaggaaattggcattgcgattccacatggctgggcgacagagtcatcaccaccagcacccgaacctgggccctccccacctacaacaaccacctctacaagcaaatctccagccaatcgggannnagcaccaacgacaacacctacttcggctacagcaccccctgggggtattttgactttaacagattccactgccacttctcaccacgtgactggcagcgactcatcaacaacaactggggattccggcccaagnnnctcaacttcaagctcttcaacatccaggtcaaggaggtcacgacgaatgatggcaccacgaccatcgccaataaccttaccagcacggttcaggtctttacggactcggaataccagctcccgtacgtcctcggctctgcgcaccagggctgcctgcctccgttcccggcggacgtcttcatgattcctcagtacgggtacctgactctgaacaatggcagtcaggccgtgggccgttcctccttctactgcctggagtactttccttctcaaatgctgagaacgggcaacaactttnnnttcagctacacgtttgaggacgtgccttttcacagcagctacgcgcacagccaaagcctggaccggctgatgaaccccctcatcgaccagtacctgtactacctgtctcggactcagaccacgagtggtaccgcaggaaatcggnnnttgcaattttctcaggccgggcctagtagcatggcgaatcaggccaaaaactggctacccgggccctgctaccggcagcaacgcgtctccaagacannnaatcaaaataacaacagcaactttgcctggaccggtgccaccaagtatcatctgaatggcagagactctctggtaaatcccggtcccgctatggcaacccacaaggacgacgaagacaaattttttccgatgagcggagtcttaatatttgggaaacagggagctggaaatagcaacgtggaccttgacaacgttatgataaccnnngaggaagaaattaaaaccaccaacccagtggccacagaannntacggcacggtggccactaacctgcaatcgnnnaacaccgctcctgctacagggaccgtcaacagtcaaggagccttacctggcatggtctggcagnnncgggacgtgtacctgcagggtcctatctgggccaagattcctcacacggacggacactttcatccctcgccgctgatgggaggctttggactgaaacacccgcctcctcagatcctgattaagaatacacctgttcccgcgaatcctccaactaccttcagtccagctaagtttgcgtcgttcatcacgcagtacagcaccggacaggtcagcgtggaaattgaatgggagctgcagaaagaaaacagcaaacgctggaacccagagattcaatacacttccaactacaacaaatctacaaatgtggactttgctgttgacacaaatggcgtttattctgagcctcgccccatcggcacccgttacctcacccgtaatctg

SEQ ID NO: 1748 - protein, 737 aa, Artificial Sequence
  Description of Artificial Sequence: Synthetic polypeptide
  misc_feature (157)..(157): Xaa can be any naturally occurring amino acid
  misc_feature (168)..(168): Xaa can be any naturally occurring amino acid
  misc_feature (262)..(263): Xaa can be any naturally occurring amino acid
  misc_feature (312)..(312): Xaa can be any naturally occurring amino acid
  misc_feature (412)..(412): Xaa can be any naturally occurring amino acid
  misc_feature (460)..(461): Xaa can be any naturally occurring amino acid
  misc_feature (552)..(552): Xaa can be any naturally occurring amino acid
  misc_feature (556)..(557): Xaa can be any naturally occurring amino acid
  misc_feature (563)..(563): Xaa can be any naturally occurring amino acid
  misc_feature (580)..(580): Xaa can be any naturally occurring amino acid
  misc_feature (588)..(588): Xaa can be any naturally occurring amino acid
  misc_feature (664)..(664): Xaa can be any naturally occurring amino acid
MAADGYLPDWLEDNLSEGIREWWDLKPGAPKPKANQQKQDDGRGLVLPGYKYLGPFNGLDKGEPVNAADAAALEHDKAYDQQLKAGDNPYLRYNHADAEFQERLQEDTSFGGNLGRAVFQAKKRVLEPLGLVEEGAKTAPGKKRPVEQSPQEPDSSXGIGKKGQQPAXKRLNFGQTGDSESVPDPQPLGEPPAAPSGVGSNTMAAGGGAPMADNNEGADGVGNASGNWHCDSTWLGDRVITTSTRTWALPTYNNHLYKQISXXQSGGSTNDNTYFGYSTPWGYFDFNRFHCHFSPRDWQRLINNNWGFRPKXLNFKLFNIQVKEVTTNDGTTTIANNLTSTVQVFTDSEYQLPYVLGSAHQGCLPPFPADVFMIPQYGYLTLNNGSQAVGRSSFYCLEYFPSQMLRTGNNFXFSYTFEDVPFHSSYAHSQSLDRLMNPLIDQYLYYLSRTQTTGGTAGNXXLQFSQAGPSSMANQAKNWLPGPCYRQQRVSKTTNQNNNSNFAWTGATKYHLNGRDSLVNPGVAMATHKDDEDRFFPSSGVLIFGKQGAGNXNVDXXNVMITXEEEIKTTNPVATEEYGXVATNLQSXNTAPQTGTVNSQGALPGMVWQNRDVYLQGPIWAKIPHTDGNFHPSPLMGGFGLKHPPPQILIKNTPVPANPPTTFXPAKFASFITQYSTGQVSVEIEWELQKENSKRWNPEIQYTSNYNKSTNVDFAVDTEGVYSEPRPIGTRYLTRNL

SEQ ID NO: 1749 - DNA, 2211 bp, Artificial Sequence
  Description of Artificial Sequence: Synthetic polynucleotide
  misc_feature (469)..(471): n is a, c, g, or t
  misc_feature (502)..(504): n is a, c, g, or t
  misc_feature (784)..(789): n is a, c, g, or t
  misc_feature (934)..(936): n is a, c, g, or t
  misc_feature (1234)..(1236): n is a, c, g, or t
  misc_feature (1378)..(1383): n is a, c, g, or t
  misc_feature (1654)..(1656): n is a, c, g, or t
  misc_feature (1666)..(1671): n is a, c, g, or t
  misc_feature (1687)..(1689): n is a, c, g, or t
  misc_feature (1738)..(1740): n is a, c, g, or t
  misc_feature (1762)..(1764): n is a, c, g, or t
  misc_feature (1990)..(1992): n is a, c, g, or t
atggctgccgatggttatcttccagattggctcgaggacaacctctctgagggcattcgcgagtggtgggacttgaaacctggagccccgaaacccaaagccaaccagcaaaagcaggacgacggccggggtctggtgcttcctggctacaagtacctcggacccttcaacggactcgacaagggggagcccgtcaacgcggcggacgcagcggccctcgagcacgacaaggcctacgaccagcagctcaaagcgggtgacaatccgtacctgcggtataaccacgccgacgccgagtttcaggagcgtctgcaagaagatacgtcttttgggggcaacctcgggcgagcagtcttccaggccaagaagcgggttctcgaacctctcggtctggttgaggaaggcgctaagacggctcctggaaagaagagaccggtagagcaatcaccccaggaaccagactcctctnnnggcatcggcaagaaaggccagcagcccgcgnnnaagagactcaactttgggcagactggcgactcagagtcagtgcccgaccctcaaccactcggagaaccccccgcagccccctctggtgtgggatctaatacaatggctgcaggcggtggcgctccaatggcagacaataacgaaggcgccgacggagtgggtaatgcctcaggaaattggcattgcgattccacatggctgggcgacagagtcatcaccaccagcacccgaacctgggccctccccacctacaacaaccacctctacaagcaaatctccnnnnnncaatcgggaggaagcaccaacgacaacacctacttcggctacagcaccccctgggggtattttgactttaacagattccactgccacttctcaccacgtgactggcagcgactcatcaacaacaactggggattccggcccaagnnnctcaacttcaagctcttcaacatccaggtcaaggaggtcacgacgaatgatggcaccacgaccatcgccaataaccttaccagcacggttcaggtctttacggactcggaataccagctcccgtacgtcctcggctctgcgcaccagggctgcctgcctccgttcccggcggacgtcttcatgattcctcagtacgggtacctgactctgaacaatggcagtcaggccgtgggccgttcctccttctactgcctggagtactttccttctcaaatgctgagaacgggcaacaactttnnnttcagctacacgtttgaggacgtgccttttcacagcagctacgcgcacagccaaagcctggaccggctgatgaaccccctcatcgaccagtacctgtactacctgtctcggactcagaccacgggaggtaccgcaggaaatnnnnnnttgcaattttctcaggccgggcctagtagcatggcgaatcaggccaaaaactggctacccgggccctgctaccggcagcaacgcgtctccaagacaacgaatcaaaataacaacagcaactttgcctggaccggtgccaccaagtatcatctgaatggcagagactctctggtaaatcccggtgtcgctatggcaacccacaaggacgacgaagaccgattttttccgtccagcggagtcttaatatttgggaaacagggagctggaaatnnnaacgtggacnnnnnnaacgttatgataaccnnngaggaagaaattaaaaccaccaacccagtggccacagaagagtacggcnnngtggccactaacctgcaatcgnnnaacaccgctcctcaaacagggaccgtcaacagtcaaggagccttacctggcatggtctggcagaaccgggacgtgtacctgcagggtcctatctgggccaagattcctcacacggacggaaactttcatccctcgccgctgatgggaggctttggactgaaacacccgcctcctcagatcctgattaagaatacacctgttcccgcgaatcctccaactaccttcnnnccagctaagtttgcgtcgttcatcacgcagtacagcaccggacaggtcagcgtggaaattgaatgggagctgcagaaagaaaacagcaaacgctggaacccagagattcaatacacttccaactacaacaaatctacaaatgtggactttgctgttgacacagaaggcgtttattctgagcctcgccccatcggcacccgttacctcacccgtaatctg

SEQ ID NO: 1750 - protein, 738 aa, Artificial Sequence
  Description of Artificial Sequence: Synthetic polypeptide
  misc_feature (158)..(158): Xaa can be any naturally occurring amino acid
  misc_feature (169)..(169): Xaa can be any naturally occurring amino acid
  misc_feature (564)..(564): Xaa can be any naturally occurring amino acid
MAADGYLPDWLEDNLSEGIREWWDLKPGAPKPKANQQKQDDGRGLVLPGYKYLGPFNGLDKGEPVNAADAAALEHDKAYDQQLKAGDNPYLRYNHADAEFQERLQEDTSFGGNLGRAVFQAKKRVLEPLGLVEEGAKTAPGKKRPVEQSPQREPDSSXGIGKKGQQPAXKRLNFGQTGDSESVPDPQPLGEPPAAPSGVGSNTMAAGGGAPMADNNEGADGVGNSSGNWHCDSTWLGDRVITTSTRTWALPTYNNHLYKQISNGTSGGSTNDNTYFGYSTPWGYFDFNRFHCHFSPRDWQRLINNNWGFRPKRLNFKLFNIQVKEVTTNEGTKTIANNLTSTVQVFTDSEYQLPYVLGSAHQGCLPPFPADVFMIPQYGYLTLNNGSQAVGRSSFYCLEYFPSQMLRTGNNFQFSYTFEDVPFHSSYAHSQSLDRLMNPLIDQYLYYLSRTQTTGGTAGTQTLQFSQAGPSSMANQAKNWLPGPCYRQQRVSTTTNQNNNSNFAWTGATKYHLNGRDSLVNPGVAMATHKDDEDRFFPSSGVLIFGKQGAGNDNVDYSNVMITXEEEIKTTNPVATEEYGVVATNLQSANTAPQTGTVNSQGALPGMVWQNRDVYLQGPIWAKIPHTDGNFHPSPLMGGFGLKHPPPQILIKNTPVPADPPTTFNQAKLNSFITQYSTGQVSVEIEWELQKENSKRWNPEIQYTSNYYKSTNVDFAVNTEGVYSEPRPIGTRYLTRNL

SEQ ID NO: 1751 - DNA, 2214 bp, Artificial Sequence
  Description of Artificial Sequence: Synthetic polynucleotide
  misc_feature (472)..(474): n is a, c, g, or t
  misc_feature (505)..(507): n is a, c, g, or t
  misc_feature (1690)..(1692): n is a, c, g, or t
atggctgccgatggttatcttccagattggctcgaggacaacctctctgagggcattcgcgagtggtgggacctgaaacctggagccccgaaacccaaagccaaccagcaaaagcaggacgacggccggggtctggtgcttcctggctacaagtacctcggacccttcaacggactcgacaagggggagcccgtcaacgcggcggacgcagcggccctcgagcacgacaaggcctacgaccagcagctcaaagcgggtgacaatccgtacctgcggtataatcacgccgacgccgagtttcaggagcgtctgcaagaagatacgtcttttgggggcaacctcgggcgagcagtcttccaggccaagaagcgggttctcgaacctctcggtctggttgaggaaggcgctaagacggctcctggaaagaagagaccggtagagcagtcaccacagcgtgagcccgactcctccnnnggcatcggcaagaaaggccagcagcccgccnnnaagagactcaatttcggtcagactggcgactcagagtcagtccccgaccctcaacctctcggagaacctccagcagcgccctctggtgtgggatctaatacaatggctgcaggcggtggcgcaccaatggcagacaataacgaaggtgccgacggagtgggtaattcctcgggaaattggcattgcgattccacatggctgggcgacagagtcatcaccaccagcacccgaacctgggccctgcccacctacaacaaccacctctacaagcaaatctccaacgggacctcgggaggcagcaccaacgacaacacctactttggctacagcaccccctgggggtattttgactttaacagattccactgccacttctcaccacgtgactggcagcgactcatcaacaacaactggggattccggcccaagagactcaacttcaagctcttcaacatccaggtcaaagaggtcacgacgaatgaaggcaccaagaccatcgccaataacctcaccagcaccgtccaggtgtttacggactcggaataccagctgccgtacgtcctcggctctgcccaccagggctgcctgcctccgttcccggcggacgtcttcatgattcctcagtacggctacctgactctcaacaacggtagtcaggccgtgggacgttcctccttctactgcctggagtacttcccctctcagatgctgagaacgggcaacaactttcaattcagctacactttcgaggacgtgcctttccacagcagctacgcgcacagccagagtttggacaggctgatgaatcctctcatcgaccagtacctgtactacctgtcaagaacccagactacgggaggcacagcgggaacccagacgttgcagttttctcaggccgggcctagcagcatggcgaatcaggccaaaaactggctgcctggaccctgctacagacagcagcgcgtctccacgacaacgaatcaaaacaacaacagcaactttgcctggactggtgccaccaagtatcatctgaacggcagagactctctggtgaatccgggcgtcgccatggcaacccacaaggacgacgaggaccgcttcttcccatccagcggcgtcctcatatttggcaagcagggagctggaaatgacaacgtggactatagcaacgtgatgataaccnnngaggaagaaatcaagaccaccaaccccgtggccacagaagagtatggcgtggtggctactaacctacagtcggcaaacaccgctcctcaaacggggaccgtcaacagccagggagccttacctggcatggtctggcagaaccgggacgtgtacctgcagggtcctatttgggccaagattcctcacacagatggcaactttcacccgtctcctttaatgggcggctttggacttaaacatccgcctcctcagatcctcatcaaaaacactcctgttcctgcggatcctccaacaacgttcaaccaggccaagctgaattctttcatcacgcagtacagcaccggacaagtcagcgtggagatcgagtgggagctgcagaaggagaacagcaagcgctggaacccagagattcagtatacttccaactactacaaatctacaaatgtggactttgctgttaatactgagggtgtttactctgagcctcgccccattggcactcgttacctcacccgtaatctg

SEQ ID NO: 1752 - protein, 738 aa, Artificial Sequence
  Description of Artificial Sequence: Synthetic polypeptide
  misc_feature (158)..(158): Xaa can be any naturally occurring amino acid
  misc_feature (169)..(169): Xaa can be any naturally occurring amino acid
  misc_feature (315)..(315): Xaa can be any naturally occurring amino acid
  misc_feature (413)..(413): Xaa can be any naturally occurring amino acid
  misc_feature (472)..(472): Xaa can be any naturally occurring amino acid
  misc_feature (534)..(534): Xaa can be any naturally occurring amino acid
  misc_feature (542)..(542): Xaa can be any naturally occurring amino acid
  misc_feature (595)..(595): Xaa can be any naturally occurring amino acid
MAADGYLPDWLEDNLSEGIREWWDLKPGAPKPKANQQKQDDGRGLVLPGYKYLGPFNGLDKGEPVNAADAAALEHDKAYDQQLKAGDNPYLRYNHADAEFQERLQEDTSFGGNLGRAVFQAKKRVLEPLGLVEEGAKTAPGKKRPVEQSPQREPDSSXGIGKKGQQPAXKRLNFGQTGDSESVPDPQPLGEPPAAPSGVGSNTMAAGGGAPMADNNEGADGVGSSSGNWHCDSTWLGDRVITTSTRTWALPTYNNHLYKQISNGTSGGSTNDNTYFGYSTPWGYFDFNRFHCHFSPRDWQRLINNNWGFRPKRLXFKLFNIQVKEVTQNEGTKTIANNLTSTIQVFTDSEYQLPYVLGSAHQGCLPPFPADVFMIPQYGYLTLNNGSQAVGRSSFYCLEYFPSQMLRTGNNFXFSYTFEDVPFHSSYAHSQSLDRLMNPLIDQYLYYLSRTQTTGGTAGTQTLQFSQAGPSXMANQAKNWLPGPCYRQQRVSTTTSQNNNSNFAWTGATKYHLNGRDSLVNPGVAMATHKDDEXRFFPSSGXLIFGKQGAGKDNVDYSNVMLTSEEEIKTTNPVATEEYGVVADNLQQQNTAPQXGTVNSQGALPGMVWQNRDVYLQGPIWAKIPHTDGNFHPSPLMGGFGLKHPPPQILIKNTPVPADPPTTFNQAKLNSFITQYSTGQVSVEIEWELQKENSKRWNPEIQYTSNYYKSTNVDFAVNTEGVYSEPRPIGTRYLTRNL

SEQ ID NO: 1753 - DNA, 2214 bp, Artificial Sequence
  Description of Artificial Sequence: Synthetic polynucleotide
  misc_feature (472)..(474): n is a, c, g, or t
  misc_feature (505)..(507): n is a, c, g, or t
  misc_feature (943)..(945): n is a, c, g, or t
  misc_feature (1237)..(1239): n is a, c, g, or t
  misc_feature (1414)..(1416): n is a, c, g, or t
  misc_feature (1600)..(1602): n is a, c, g, or t
  misc_feature (1624)..(1626): n is a, c, g, or t
  misc_feature (1783)..(1785): n is a, c, g, or t
atggctgccgatggttatcttccagattggctcgaggacaacctctctgagggcattcgcgagtggtgggacctgaaacctggagccccgaaacccaaagccaaccagcaaaagcaggacgacggccggggtctggtgcttcctggctacaagtacctcggacccttcaacggactcgacaagggggagcccgtcaacgcggcggacgcagcggccctcgagcacgacaaggcctacgaccagcagctcaaagcgggtgacaatccgtacctgcggtataatcacgccgacgccgagtttcaggagcgtctgcaagaagatacgtcttttgggggcaacctcgggcgagcagtcttccaggccaagaagcgggttctcgaacctctcggtctggttgaggaaggcgctaagacggctcctggaaagaagagaccggtagagcagtcaccacagcgtgagcccgactcctccnnnggcatcggcaagaaaggccagcagcccgccnnnaagagactcaatttcggtcagactggcgactcagagtcagtccccgaccctcaacctctcggagaacctccagcagcgccctctggtgtgggatctaatacaatggctgcaggcggtggcgcaccaatggcagacaataacgaaggtgccgacggagtgggtagttcctcgggaaattggcattgcgattccacatggctgggcgacagagtcatcaccaccagcacccgaacctgggccctgcccacctacaacaaccacctctacaagcaaatctccaacgggacctcgggaggcagcaccaacgacaacacctactttggctacagcaccccctgggggtattttgactttaacagattccactgccacttctcaccacgtgactggcagcgactcatcaacaacaactggggattccggcccaagagactcnnnttcaagctcttcaacatccaggtcaaagaggtcacgcagaatgaaggcaccaagaccatcgccaataacctcaccagcaccatccaggtgtttacggactcggaataccagctgccgtacgtcctcggctctgcccaccagggctgcctgcctccgttcccggcggacgtcttcatgattcctcagtacggctacctgactctcaacaacggtagtcaggccgtgggacgttcctccttctactgcctggagtacttcccctctcagatgctgagaacgggcaacaactttnnnttcagctacactttcgaggacgtgcctttccacagcagctacgcgcacagccagagtttggacaggctgatgaatcctctcatcgaccagtacctgtactacctgtcaagaacccagactacgggaggcacagcgggaacccagacgttgcagttttctcaggccgggcctagcnnnatggcgaatcaggccaaaaactggctgcctggaccctgctacagacagcagcgcgtctccacgacaacgtcgcaaaacaacaacagcaactttgcctggactggtgccaccaagtatcatctgaacggcagagactctctggtgaatccgggcgtcgccatggcaacccacaaggacgacgagnnncgcttcttcccatccagcggcnnnctcatatttggcaagcagggagctggaaaagacaacgtggactatagcaacgtgatgctaaccagcgaggaagaaatcaagaccaccaaccccgtggccacagaagagtatggcgtggtggctgataacctacagcagcaaaacaccgctcctcaannngggaccgtcaacagccagggagccttacctggcatggtctggcagaaccgggacgtgtacctgcagggtcctatttgggccaagattcctcacacagatggcaactttcacccgtctcctttaatgggcggctttggacttaaacatccgcctcctcagatcctcatcaaaaacactcctgttcctgcggatcctccaacaacgttcaaccaggccaagctgaattctttcatcacgcagtacagcaccggacaagtcagcgtggagatcgagtgggagctgcagaaggagaacagcaagcgctggaacccagagattcagtatacttccaactactacaaatctacaaatgtggactttgctgttaatactgagggtgtttactctgagcctcgccccattggcactcgttacctcacccgtaatctg

SEQ ID NO: 1754 - protein, 738 aa, Artificial Sequence
  Description of Artificial Sequence: Synthetic polypeptide
  misc_feature (169)..(169): Xaa can be any naturally occurring amino acid
  misc_feature (315)..(315): Xaa can be any naturally occurring amino acid
  misc_feature (534)..(534): Xaa can be any naturally occurring amino acid
  misc_feature (542)..(542): Xaa can be any naturally occurring amino acid
MAADGYLPDWLEDNLSEGIREWWDLKPGAPKPKANQQKQDDGRGLVLPGYKYLGPFNGLDKGEPVNAADAAALEHDKAYDQQLKAGDNPYLRYNHADAEFQERLQEDTSFGGNLGRAVFQAKKRVLEPLGLVEEGAKTAPGKKRPVEPSPQRSPDSSTGIGKKGQQPAXKRLNFGQTGDSESVPDPQPIGEPPAAPSGVGSGTMAAGGGAPMADNNEGADGVGSSSGNWHCDSTWLGDRVITTSTRTWALPTYNNHLYKQISNGTSGGSTNDNTYFGYSTPWGYFDFNRFHCHFSPRDWQRLINNNWGFRPKRLXFKLFNIQVKEVTQNEGTKTIANNLTSTIQVFTDSEYQLPYVLGSAHQGCLPPFPADVFMIPQYGYLTLNNGSQAVGRSSFYCLEYFPSQMLRTGNNFEFSYTFEDVPFHSSYAHSQSLDRLMNPLIDQYLYYLSRTQSTGGTAGTQQLLFSQAGPSNMSAQAKNWLPGPCYRQQRVSTTLSQNNNSNFAWTGATKYHLNGRDSLVNPGVAMATHKDDEXRFFPSSGXLMFGKQGAGKDNVDYSNVMLTSEEEIKTTNPVATEQYGVVADNLQQQNTAPIVGAVNSQGALPGMVWQNRDVYLQGPIWAKIPHTDGNFHPSPLMGGFGLKHPPPQILIKNTPVPADPPTTFNQAKLNSFITQYSTGQVSVEIEWELQKENSKRWNPEIQYTSNYYKSTNVDFAVNTEGVYSEPRPIGTRYLTRNL

SEQ ID NO: 1755 - DNA, 2214 bp, Artificial Sequence
  Description of Artificial Sequence: Synthetic polynucleotide
  misc_feature (505)..(507): n is a, c, g, or t
  misc_feature (943)..(945): n is a, c, g, or t
  misc_feature (1600)..(1602): n is a, c, g, or t
  misc_feature (1624)..(1626): n is a, c, g, or t
atggctgccgatggttatcttccagattggctcgaggacaacctctctgagggcattcgcgagtggtgggacctgaaacctggagccccgaaacccaaagccaaccagcaaaagcaggacgacggccggggtctggtgcttcctggctacaagtacctcggacccttcaacggactcgacaagggggagcccgtcaacgcggcggacgcagcggccctcgagcacgacaaggcctacgaccagcagctcaaagcgggtgacaatccgtacctgcggtataatcacgccgacgccgagtttcaggagcgtctgcaagaagatacgtcttttgggggcaacctcgggcgagcagtcttccaggccaagaagcgggttctcgaacctctcggtctggttgaggaaggcgctaagacggctcctggaaagaagagaccggtagagccgtcaccacagcgttcccccgactcctccacgggcatcggcaagaaaggccagcagcccgccnnnaagagactcaatttcggtcagactggcgactcagagtcagtccccgaccctcaacctatcggagaacctccagcagcgccctctggtgtgggatctggtacaatggctgcaggcggtggcgcaccaatggcagacaataacgaaggtgccgacggagtgggtagttcctcgggaaattggcattgcgattccacatggctgggcgacagagtcatcaccaccagcacccgaacctgggccctgcccacctacaacaaccacctctacaagcaaatctccaacgggacctcgggaggcagcaccaacgacaacacctactttggctacagcaccccctgggggtattttgactttaacagattccactgccacttctcaccacgtgactggcagcgactcatcaacaacaactggggattccggcccaagagactcnnnttcaagctcttcaacatccaggtcaaagaggtcacgcagaatgaaggcaccaagaccatcgccaataacctcaccagcaccatccaggtgtttacggactcggaataccagctgccgtacgtcctcggctctgcccaccagggctgcctgcctccgttcccggcggacgtcttcatgattcctcagtacggctacctgactctcaacaacggtagtcaggccgtgggacgttcctccttctactgcctggagtacttcccctctcagatgctgagaacgggcaacaactttgagttcagctacactttcgaggacgtgcctttccacagcagctacgcgcacagccagagtttggacaggctgatgaatcctctcatcgaccagtacctgtactacctgtcaagaacccagtctacgggaggcacagcgggaacccagcagttgctgttttctcaggccgggcctagcaacatgtcggctcaggccaaaaactggctgcctggaccctgctacagacagcagcgcgtctccacgacactgtcgcaaaacaacaacagcaactttgcctggactggtgccaccaagtatcatctgaacggcagagactctctggtgaatccgggcgtcgccatggcaacccacaaggacgacgagnnncgcttcttcccatccagcggcnnnctcatgtttggcaagcagggagctggaaaagacaacgtggactatagcaacgtgatgctaaccagcgaggaagaaatcaagaccaccaaccccgtggccacagaacagtatggcgtggtggctgataacctacagcagcaaaacaccgctcctattgtgggggccgtcaacagccagggagccttacctggcatggtctggcagaaccgggacgtgtacctgcagggtcctatttgggccaagattcctcacacagatggcaactttcacccgtctcctttaatgggcggctttggacttaaacatccgcctcctcagatcctcatcaaaaacactcctgttcctgcggatcctccaacaacgttcaaccaggccaagctgaattctttcatcacgcagtacagcaccggacaagtcagcgtggagatcgagtgggagctgcagaaggagaacagcaagcgctggaacccagagattcagtatacttccaactactacaaatctacaaatgtggactttgctgttaatactgagggtgtttactctgagcctcgccccattggcactcgttacctcacccgtaatctg

SEQ ID NO: 1756 - protein, 738 aa, Artificial Sequence
  Description of Artificial Sequence: Synthetic polypeptide
  misc_feature (471)..(471): Xaa can be any naturally occurring amino acid
MAADGYLPDWLEDNLSEGIREWWDLKPGAPKPKANQQKQDDGRGLVLPGYKYLGPFNGLDKGEPVNAADAAALEHDKAYDQQLKAGDNPYLRYNHADAEFQERLQEDTSFGGNLGRAVFQAKKRVLEPLGLVEEGAKTAPGKKRPVEPSPQRSPDSSTGIGKKGQQPAKKRLNFGQTGDSESVPDPQPIGEPPAGPSGLGSGTMAAGGGAPMADNNEGADGVGSSSGNWHCDSTWLGDRVITTSTRTWALPTYNNHLYKQISNGTSGGSTNDNTYFGYSTPWGYFDFNRFHCHFSPRDWQRLINNNWGFRPKRLNFKLFNIQVKEVTQNEGTKTIANNLTSTIQVFTDSEYQLPYVLGSAHQGCLPPFPADVFMIPQYGYLTLNNGSQAVGRSSFYCLEYFPSQMLRTGNNFEFSYTFEDVPFHSSYAHSQSLDRLMNPLIDQYLYYLSRTQSTGGTAGTQQLLFSQAGPXNMSAQAKNWLPGPCYRQQRVSTTLSQNNNSNFAWTGATKYHLNGRDSLVNPGVAMATHKDDEERFFPSSGVLMFGKQGAGKDNVDYSSVMLTSEEEIKTTNPVATEQYGVVADNLQQQNTAPIVGAVNSQGALPGMVWQNRDVYLQGPIWAKIPHTDGNFHPSPLMGGFGLKHPPPQILIKNTPVPADPPTTFSQAKLASFITQYSTGQVSVEIEWELQKENSKRWNPEIQYTSNYYKSTNVDFAVNTEGTYSEPRPIGTRYLTRNL

SEQ ID NO: 1757 - DNA, 2214 bp, Artificial Sequence
  Description of Artificial Sequence: Synthetic polynucleotide
  misc_feature (1411)..(1413): n is a, c, g, or t
atggctgccgatggttatcttccagattggctcgaggacaacctctctgagggcattcgcgagtggtgggacttgaaacctggagccccgaaacccaaagccaaccagcaaaagcaggacgacggccggggtctggtgcttcctggctacaagtacctcggacccttcaacggactcgacaagggggagcccgtcaacgcggcggacgcagcggccctcgagcacgacaaggcctacgaccagcagctcaaagcgggtgacaatccgtacctgcggtataaccacgccgacgccgagtttcaggagcgtctgcaagaagatacgtcttttgggggcaacctcgggcgagcagtcttccaggccaagaagcgggttctcgaacctctcggtctggttgaggaaggcgctaagacggctcctggaaagaagagaccggtagagccatcaccccagcgttctccagactcctctacgggcatcggcaagaaaggccagcagcccgcgaaaaagagactcaactttgggcagactggcgactcagagtcagtgcccgaccctcaaccaatcggagaaccccccgcaggcccctctggtctgggatctggtacaatggctgcaggcggtggcgctccaatggcagacaataacgaaggcgccgacggagtgggtagttcctcaggaaattggcattgcgattccacatggctgggcgacagagtcatcaccaccagcacccgaacctgggccctccccacctacaacaaccacctctacaagcaaatctccaacgggacttcgggaggaagcaccaacgacaacacctacttcggctacagcaccccctgggggtattttgactttaacagattccactgccacttctcaccacgtgactggcagcgactcatcaacaacaactggggattccggcccaagagactcaacttcaagctcttcaacatccaggtcaaggaggtcacgcagaatgaaggcaccaagaccatcgccaataaccttaccagcacgattcaggtctttacggactcggaataccagctcccgtacgtcctcggctctgcgcaccagggctgcctgcctccgttcccggcggacgtcttcatgattcctcagtacgggtacctgactctgaacaatggcagtcaggccgtgggccgttcctccttctactgcctggagtactttccttctcaaatgctgagaacgggcaacaactttgagttcagctacacgtttgaggacgtgccttttcacagcagctacgcgcacagccaaagcctggaccggctgatgaaccccctcatcgaccagtacctgtactacctgtctcggactcagtccacgggaggtaccgcaggaactcagcagttgctattttctcaggccgggcctnnnaacatgtcggctcaggccaaaaactggctacccgggccctgctaccggcagcaacgcgtctccacgacactgtcgcaaaataacaacagcaactttgcctggaccggtgccaccaagtatcatctgaatggcagagactctctggtaaatcccggtgtcgctatggcaacccacaaggacgacgaagagcgattttttccgtccagcggagtcttaatgtttgggaaacagggagctggaaaagacaacgtggactatagcagcgttatgctaaccagtgaggaagaaattaaaaccaccaacccagtggccacagaacagtacggcgtggtggccgataacctgcaacagcaaaacaccgctcctattgtaggggccgtcaacagtcaaggagccttacctggcatggtctggcagaaccgggacgtgtacctgcagggtcctatctgggccaagattcctcacacggacggaaactttcatccctcgccgctgatgggaggctttggactgaaacacccgcctcctcagatcctgattaagaatacacctgttcccgcggatcctccaactaccttcagtcaagctaagctggcgtcgttcatcacgcagtacagcaccggacaggtcagcgtggaaattgaatgggagctgcagaaagaaaacagcaaacgctggaacccagagattcaatacacttccaactactacaaatctacaaatgtggactttgctgttaacacagaaggcacttattctgagcctcgccccatcggcacccgttacctcacccgtaatctg

SEQ ID NO: 1758 - protein, 737 aa, Artificial Sequence
  Description of Artificial Sequence: Synthetic polypeptide
  misc_feature (148)..(148): Xaa can be any naturally occurring amino acid
  misc_feature (169)..(169): Xaa can be any naturally occurring amino acid
  misc_feature (314)..(314): Xaa can be any naturally occurring amino acid
  misc_feature (466)..(466): Xaa can be any naturally occurring amino acid
  misc_feature (563)..(563): Xaa can be any naturally occurring amino acid
  misc_feature (580)..(580): Xaa can be any naturally occurring amino acid
  misc_feature (588)..(588): Xaa can be any naturally occurring amino acid
MAADGYLPDWLEDNLSEGIREWWDLKPGAPKPKANQQKQDDGRGLVLPGYKYLGPFNGLDKGEPVNAADAAALEHDKAYDQQLKAGDNPYLRYNHADAEFQERLQEDTSFGGNLGRAVFQAKKRVLEPLGLVEEGAKTAPGKKRPVEXSPQRSPDSSTGIGKKGQQPAXKRLNFGQTGDSESVPDPQPLGEPPAAPSGVGSGTMAAGGGAPMADNNEGADGVGNASGNWHCDSTWLGDRVITTSTRTWALPTYNNHLYKQISSQSAGSTNDNTYFGYSTPWGYFDFNRFHCHFSPRDWQRLINNNWGFRPKKLXFKLFNIQVKEVTTNDGVTTIANNLTSTVQVFSDSEYQLPYVLGSAHQGCLPPFPADVFMIPQYGYLTLNNGSQSVGRSSFYCLEYFPSQMLRTGNNFEFSYTFEDVPFHSSYAHSQSLDRLMNPLIDQYLYYLARTQSTTGGTAGNRELQFXQAGPSTMAEQAKNWLPGPCYRQQRVSKTLDQNNNSNFAWTGATKYHLNGRNSLVNPGVAMATHKDDEDRFFPSSGVLIFGKTGAANKTTLENVLMTXEEEIKTTNPVATEEYGXVSSNLQSXNTAPQTQTVNSQGALPGMVWQNRDVYLQGPIWAKIPHTDGNFHPSPLMGGFGLKHPPPQILIKNTPVPANPPEVFTPAKFASFITQYSTGQVSVEIEWELQKENSKRWNPEIQYTSNYDKSTNVDFAVDSEGVYSEPRPIGTRYLTRNL

SEQ ID NO: 1759 - DNA, 2211 bp, Artificial Sequence
  Description of Artificial Sequence: Synthetic polynucleotide
  misc_feature (442)..(444): n is a, c, g, or t
  misc_feature (505)..(507): n is a, c, g, or t
  misc_feature (940)..(942): n is a, c, g, or t
  misc_feature (1396)..(1398): n is a, c, g, or t
  misc_feature (1687)..(1689): n is a, c, g, or t
  misc_feature (1738)..(1740): n is a, c, g, or t
  misc_feature (1762)..(1764): n is a, c, g, or t
atggctgccgatggttatcttccagattggctcgaggacaacctctctgagggcattcgcgagtggtgggacctgaaacctggagccccgaaacccaaagccaaccagcaaaagcaggacgacggccggggtctggtgcttcctggctacaagtacctcggacccttcaacggactcgacaagggggagcccgtcaacgcggcggacgcagcggccctcgagcacgacaaggcctacgaccagcagctcaaagcgggtgacaatccgtacctgcggtataaccacgccgacgccgagtttcaggagcgtctgcaagaagatacgtcatttgggggcaacctcgggcgagcagtcttccaggccaagaagcgggttctcgaacctctcggtctggttgaggaaggcgctaagacggctcctggaaagaagagaccggtagagnnntcacctcagcgttcccccgactcctccacgggcatcggcaagaaaggccagcagcccgccnnnaagagactcaatttcggtcagactggcgactcagagtcagtccccgaccctcaacctctcggagaacctccagcagcgccctctggtgtgggatctggtacaatggctgcaggcggtggcgcaccaatggcagacaataacgaaggtgccgacggagtgggtaatgcctcaggaaattggcattgcgattccacatggctgggcgacagagtcattaccaccagcacccgaacctgggccctgcccacctacaacaaccacctctacaagcaaatctccagtcaaagtgcaggtagtaccaacgacaacacctacttcggctacagcaccccctgggggtattttgactttaacagattccactgccacttctcaccacgtgactggcagcgactcatcaacaacaactggggattccggcccaagaagctgnnnttcaagctcttcaacatccaggtcaaggaggtcacgacgaatgacggcgttacgaccatcgctaataaccttaccagcacggttcaggtattctcggactcggaataccagctgccgtacgtcctcggctctgcgcaccagggctgcctgcctccgttcccggcggacgtcttcatgattcctcagtacggctacctgactctcaacaatggcagtcagtctgtgggacgttcctccttctactgcctggagtacttcccctctcagatgctgagaacgggcaacaactttgagttcagctacaccttcgaggacgtgcctttccacagcagctacgcacacagccagagcctggaccggctgatgaatcccctcatcgaccagtacttgtactacctggccagaacacagagtaccacaggaggcacagctggcaatcgggaactgcagtttnnncaggccgggccttcaactatggccgaacaagccaagaattggttacctggaccttgctaccggcaacaaagagtctccaaaacgctggatcaaaacaacaacagcaactttgcttggactggtgccaccaaatatcacctgaacggcagaaactcgttggttaatcccggcgtcgccatggcaactcacaaggacgacgaggaccgctttttcccatccagcggagtcctgatttttggaaaaactggagcagctaacaaaactacattggaaaatgtgttaatgacannngaagaagaaattaaaactactaatcctgtagccacggaagaatacgggnnngtcagcagcaacttacaatcgnnnaatactgcaccccagacacaaactgtcaacagccagggagccttacctggcatggtctggcagaaccgggacgtgtacctgcagggtcccatctgggccaagattcctcacacggatggcaactttcacccgtctcctttgatgggcggctttggacttaaacatccgcctcctcagatcctgatcaagaacactcccgttcccgctaatcctccggaggtgtttactcctgccaagtttgcttcgttcatcacacagtacagcaccggacaagtcagcgtggaaatcgagtgggagctgcagaaggaaaacagcaagcgctggaacccggagattcagtacacctccaactatgataagtcgactaatgtggactttgccgttgacagcgagggtgtttactctgagcctcgccctattggcactcgttacctcacccgtaatctg

SEQ ID NO: 1760 - protein, 735 aa, Artificial Sequence
  Description of Artificial Sequence: Synthetic polypeptide
  misc_feature (162)..(162): Xaa can be any naturally occurring amino acid
  misc_feature (168)..(168): Xaa can be any naturally occurring amino acid
  misc_feature (224)..(224): Xaa can be any naturally occurring amino acid
  misc_feature (310)..(310): Xaa can be any naturally occurring amino acid
  misc_feature (410)..(410): Xaa can be any naturally occurring amino acid
  misc_feature (446)..(446): Xaa can be any naturally occurring amino acid
  misc_feature (461)..(461): Xaa can be any naturally occurring amino acid
  misc_feature (471)..(471): Xaa can be any naturally occurring amino acid
  misc_feature (708)..(708): Xaa can be any naturally occurring amino acid
MAADGYLPDWLEDNLSEGIREWWDLKPGAPKPKANQQKQDDGRGLVLPGYKYLGPFNGLDKGEPVNAADAAALEHDKAYDQQLKAGDNPYLRYNHADAEFQERLQEDTSFGGNLGRAVFQAKKRVLEPLGLVEEGAKTAPGKKRPVEQSPQEPDSSSGIGKXGQQPAXKRLNFGQTGDSESVPDPQPLGEPPAAPSGVGSNTMASGGGAPMADNNEGADGVGNXSGNWHCDSTWLGDRVITTSTRTWALPTYNNHLYKQISSQSGASNDNHYFGYSTPWGYFDFNRFHCHFSPRDWQRLINNNWGFRPKXLNFKLFNIQVKEVTTNDGTTTIANNLTSTVQVFTDSEYQLPYVLGSAHQGCLPPFPADVFMIPQYGYLTLNNGSQAVGRSSFYCLEYFPSQMLRTGNNFXFSYTFEDVPFHSSYAHSQSLDRLMNPLIDQYLYYLXRTQTTSGTAQNRELXFSQAGPSSMXNQAKNWLPGPCYRQQRVSKTANDNNNSNFAWTGATKYHLNGRDSLVNPGPAMASHKDDEDKFFPMSGVLIFGKQGAGASNVDLDNVMITDEEEIKTTNPVATEQYGTVATNLQSSNTAPATGTVNSQGALPGMVWQDRDVYLQGPIWAKIPHTDGHFHPSPLMGGFGLKHPPPQILIKNTPVPANPPTTFSPAKFASFITQYSTGQVSVEIEWELQKENSKRWNPEIQYTSNYNKSXNVDFTVDTNGVYSEPRPIGTRYLTRNL

SEQ ID NO: 1761 - DNA, 2205 bp, Artificial Sequence
  Description of Artificial Sequence: Synthetic polynucleotide
  misc_feature (484)..(486): n is a, c, g, or t
  misc_feature (502)..(504): n is a, c, g, or t
  misc_feature (670)..(672): n is a, c, g, or t
  misc_feature (928)..(930): n is a, c, g, or t
  misc_feature (1228)..(1230): n is a, c, g, or t
  misc_feature (1336)..(1338): n is a, c, g, or t
  misc_feature (1381)..(1383): n is a, c, g, or t
  misc_feature (1411)..(1413): n is a, c, g, or t
  misc_feature (2122)..(2124): n is a, c, g, or t
atggctgccgatggttatcttccagattggctcgaggacaacctctctgagggcattcgcgagtggtgggacttgaaacctggagccccgaaacccaaagccaaccagcaaaagcaggacgacggccggggtctggtgcttcctggctacaagtacctcggacccttcaacggactcgacaagggggagcccgtcaacgcggcggatgcagcggccctcgagcacgacaaggcctacgaccagcagctcaaagcgggtgacaatccgtacctgcggtataaccacgccgacgccgagtttcaggagcgtctgcaagaagatacgtcttttgggggcaacctcgggcgagcagtcttccaggccaagaagagggttctcgaacctcttggtctggttgaggaaggtgctaagacggctcctggaaagaaacgtccggtagagcagtcgccacaagagccagactcctcctcgggcattggcaagnnnggccagcagcccgctnnnaagagactcaattttggtcagactggcgactcagagtcagtccccgacccacaacctctcggagaacctccagcagccccctctggtgtgggatctaatacaatggcttcaggcggtggcgcaccaatggcagacaataacgaaggcgccgacggagtgggtaatnnntcaggaaattggcattgcgattccacatggctgggcgacagagtcatcaccaccagcacccgaacatgggccttgcccacctataacaaccacctctacaagcaaatctccagtcaatcaggggccagcaacgacaaccactacttcggctacagcaccccctgggggtattttgatttcaacagattccactgccatttctcaccacgtgactggcagcgactcatcaacaacaattggggattccggcccaagnnnctcaacttcaagctcttcaacatccaagtcaaggaggtcacgacgaatgatggcaccacgaccatcgctaataaccttaccagcacggttcaagtcttcacggactcggagtaccagttgccgtacgtcctcggctctgcgcaccagggctgcctccctccgttcccggcggacgtgttcatgattccgcagtacggctacctaacgctcaacaatggcagccaggcagtgggacggtcatccttttactgcctggaatatttcccatcgcagatgctgagaacgggcaataactttnnnttcagctacaccttcgaggacgtgcctttccacagcagctacgcgcacagccagagcctggaccggctgatgaatcctctcatcgaccagtacctgtattacctgnnnagaactcagactacgtccggaactgcccaaaacagggagttgnnntttagccaggcgggtccatctagcatgnnnaatcaggccaaaaactggctacctggaccctgttaccggcagcagcgcgtttctaaaacagcaaatgacaacaacaacagcaactttgcctggactggtgctacaaaatatcaccttaatgggcgtgattctttagtcaaccctggccctgctatggcctcacacaaagacgacgaagacaagttctttcccatgagcggtgtcttgatttttggaaagcagggcgccggagcttcaaacgttgatttggacaatgtcatgatcacagacgaagaggaaatcaaaaccactaaccccgtggccaccgaacaatatgggactgtggcaaccaatctccagagcagcaacacagcccctgcgaccggaactgtgaattctcagggagccttacctggaatggtgtggcaagacagagacgtatacctgcagggtcctatttgggccaaaattcctcacacggatggacactttcacccgtctcctctcatgggcggctttggacttaagcacccgcctcctcagatcctcatcaaaaacacgcctgttcctgcgaatcctccgacaacgttttcgcctgcaaagtttgcttcattcatcacccagtattccacaggacaagtgagcgtggagattgaatgggagctgcagaaagaaaacagcaaacgctggaatcccgaaatacagtatacatctaactataataaatctnnnaacgttgatttcactgtggacaccaatggagtttatagtgagcctcgccccattggcacccgttacctcacccgtaacctg

SEQ ID NO: 1762 - protein, 735 aa, Artificial Sequence
  Description of Artificial Sequence: Synthetic polypeptide
  misc_feature (42)..(42): Xaa can be any naturally occurring amino acid
  misc_feature (168)..(168): Xaa can be any naturally occurring amino acid
  misc_feature (310)..(310): Xaa can be any naturally occurring amino acid
  misc_feature (410)..(410): Xaa can be any naturally occurring amino acid
  misc_feature (446)..(446): Xaa can be any naturally occurring amino acid
  misc_feature (461)..(461): Xaa can be any naturally occurring amino acid
  misc_feature (471)..(471): Xaa can be any naturally occurring amino acid
  misc_feature (475)..(475): Xaa can be any naturally occurring amino acid
  misc_feature (504)..(504): Xaa can be any naturally occurring amino acid
  misc_feature (539)..(539): Xaa can be any naturally occurring amino acid
MAADGYLPDWLEDNLSEGIREWWDLKPGAPQPKANQQHQDDXRGLVLPGYKYLGPFNGLDKGEPVNEADAAALEHDKAYDQQLKAGDNPYLKYNHADAEFQERLQEDTSFGGNLGRAVFQAKKRVLEPLGLVEEAAKTAPGKKRPVEQSPQEPDSSSGIGKSGQQPAXKRLNFGQTGDSESVPDPQPLGEPPAAPSGVGSNTMASGGGAPMADNNEGADGVGNSSGNWHCDSTWLGDRVITTSTRTWALPTYNNHLYKQISSQSGASNDNHYFGYSTPWGYFDFNRFHCHFSPRDWQRLINNNWGFRPKXLNFKLFNIQVKEVTQNDGTTTIANNLTSTVQVFTDSEYQLPYVLGSAHQGCLPPFPADVFMIPQYGYLTLNNGSQAVGRSSFYCLEYFPSQMLRTGNNFXFSYTFEDVPFHSSYAHSQSLDRLMNPLIDQYLYYLXRTQTTSGTTQQSRLXFSQAGPSSMXQQAXNWLPGPCYRQQRVSKTANDNNNSNFAWTXATKYHLNGRDSLVNPGPAMASHKDDEEKFFPMHGXLIFGKQGTGASNVDLDNVMITDEEEIRTTNPVATEQYGTVATNLQSSNTAPATGTVNSQGALPGMVWQDRDVYLQGPIWAKIPHTDGHFHPSPLMGGFGLKHPPPQILIKNTPVPANPPTTFSPAKFASFITQYSTGQVSVEIEWELQKENSKRWNPEIQYTSNYNKSVNVDFTVDTNGVYSEPRPIGTRYLTRNL

SEQ ID NO: 1763 - DNA, 2205 bp, Artificial Sequence
  Description of Artificial Sequence: Synthetic polynucleotide
  misc_feature (124)..(126): n is a, c, g, or t
  misc_feature (502)..(504): n is a, c, g, or t
  misc_feature (928)..(930): n is a, c, g, or t
  misc_feature (1228)..(1230): n is a, c, g, or t
  misc_feature (1336)..(1338): n is a, c, g, or t
  misc_feature (1381)..(1383): n is a, c, g, or t
  misc_feature (1411)..(1413): n is a, c, g, or t
  misc_feature (1423)..(1425): n is a, c, g, or t
  misc_feature (1510)..(1512): n is a, c, g, or t
  misc_feature (1615)..(1617): n is a, c, g, or t
atggctgctgacggttatcttccagattggctcgaggacaacctttctgaaggcattcgtgagtggtgggatctgaaacctggagcccctcaacccaaagcgaaccaacaacaccaggacgacnnncggggtcttgtgcttccgggttacaaatacctcggaccctttaacggactcgacaaaggagagccggtcaacgaggcggacgcggcagccctcgaacacgacaaagcttacgaccagcagctcaaggccggtgacaacccgtacctcaagtacaaccacgccgacgccgagtttcaggagcgtcttcaagaagatacgtcttttgggggcaaccttggcagagcagtcttccaggccaaaaagagggtccttgagcctcttggtctggttgaggaagcagctaaaacggctcctggaaagaagaggcctgtagaacagtctcctcaggaaccggactcatcatctggtattggcaaatcgggccaacagcctgccnnnaaaagactaaatttcggtcagactggagactcagagtcagtcccagaccctcaacctctcggagaaccaccagcagccccctcaggtgtgggatctaatacaatggcttcaggcggtggcgcaccaatggcagacaataacgagggtgccgatggagtgggtaattcctcaggaaattggcattgcgattccacatggctgggcgacagagtcatcaccaccagcaccagaacctgggccctgcccacttacaacaaccatctctacaagcaaatctccagccaatcaggagcttcaaacgacaaccactactttggctacagcaccccttgggggtattttgactttaacagattccactgccacttctcaccacgtgactggcagcgactcattaacaacaactggggattccggcccaagnnnctcaacttcaagctcttcaacatccaagttaaagaggtcacgcagaacgatggcacgacgactattgccaataaccttaccagcacggttcaagtgtttacggactcggagtatcagctcccgtacgtgctcgggtcggcgcaccaaggctgtctcccgccgtttccagcggacgtcttcatgatccctcagtatggatacctcaccctgaacaacggaagtcaagcggtgggacgctcatccttttactgcctggagtacttcccttcgcagatgctaaggactggaaataacttcnnnttcagctataccttcgaggatgtaccttttcacagcagctacgctcacagccagagtttggatcgcttgatgaatcctcttattgatcagtatctgtactacctgnnnagaacgcaaacaacctctggaacaacccaacaatcacggctgnnntttagccaggctgggccttcgtctatgnnncagcaggccnnnaattggctacctgggccctgctaccggcaacagagagtttcaaagactgctaacgacaacaacaacagtaactttgcttggacannngccaccaaatatcatctcaatggccgcgactcgctggtgaatccaggaccagctatggccagtcacaaggacgatgaagaaaaatttttccctatgcacggcnnnctaatatttggcaaacaagggacaggggcaagtaacgtagatttagataatgtaatgattacggatgaagaagagattcgtaccaccaatcctgtggcaacagagcagtatggaactgtggcaactaacttgcagagctcaaatacagctcccgcgactggaactgtcaatagtcagggggccttacctggcatggtgtggcaagatcgtgacgtgtaccttcaaggacctatctgggcaaagattcctcacacggatggacactttcatccttctcctctgatgggaggctttggactgaaacatccgcctcctcaaatcttgatcaaaaatactccggtaccggcaaatcctccgacgactttcagcccggccaagtttgcttcatttatcactcagtactccactggacaggtcagcgtggaaattgagtgggagctacagaaagaaaacagcaaacgttggaatccagagattcagtacacttccaactacaacaagtctgttaatgtggactttactgtagacactaatggtgtttatagtgaacctcgccctattggaacccggtatctcacacgaaacttg

SEQ ID NO: 1764 - protein, 736 aa, Artificial Sequence; identical to SEQ ID NO: 1472
  Description of Artificial Sequence: Synthetic polypeptide

SEQ ID NO: 1765 - protein, 736 aa, Artificial Sequence; identical to SEQ ID NO: 1473
  Description of Artificial Sequence: Synthetic polypeptide

SEQ ID NO: 1766 - protein, 736 aa, Artificial Sequence; identical to SEQ ID NO: 1474
  Description of Artificial Sequence: Synthetic polypeptide

SEQ ID NO: 1767 - protein, 736 aa, Artificial Sequence; identical to SEQ ID NO: 1475
  Description of Artificial Sequence: Synthetic polypeptide

SEQ ID NO: 1768 - protein, 736 aa, Artificial Sequence; identical to SEQ ID NO: 1476
  Description of Artificial Sequence: Synthetic polypeptide

SEQ ID NO: 1769 - protein, 736 aa, Artificial Sequence; identical to SEQ ID NO: 1477
  Description of Artificial Sequence: Synthetic polypeptide

SEQ ID NO: 1770 - protein, 736 aa, Artificial Sequence; identical to SEQ ID NO: 1478
  Description of Artificial Sequence: Synthetic polypeptide

SEQ ID NO: 1771 - protein, 736 aa, Artificial Sequence; identical to SEQ ID NO: 1479
  Description of Artificial Sequence: Synthetic polypeptide

SEQ ID NO: 1772 - DNA, 2211 bp, Artificial Sequence; identical to SEQ ID NO: 1480
  Description of Artificial Sequence: Synthetic polynucleotide

SEQ ID NO: 1773 - protein, 738 aa, Artificial Sequence; identical to SEQ ID NO: 7
  Description of Artificial Sequence: Synthetic polypeptide

SEQ ID NO: 1774 - protein, 738 aa, Artificial Sequence; identical to SEQ ID NO: 7
  Description of Artificial Sequence: Synthetic polypeptide

SEQ ID NO: 1775 - protein, 738 aa, Artificial Sequence
  Description of Artificial Sequence: Synthetic polypeptide
  misc_feature (157)..(157): Xaa can be any naturally occurring amino acid
  misc_feature (169)..(169): Xaa can be any naturally occurring amino acid
  misc_feature (457)..(457): Xaa can be any naturally occurring amino acid
  misc_feature (463)..(463): Xaa can be any naturally occurring amino acid
  misc_feature (508)..(508): Xaa can be any naturally occurring amino acid
  misc_feature (510)..(511): Xaa can be any naturally occurring amino acid
  misc_feature (558)..(558): Xaa can be any naturally occurring amino acid
  misc_feature (585)..(585): Xaa can be any naturally occurring amino acid
  misc_feature (587)..(587): Xaa can be any naturally occurring amino acid
MAADGYLPDWLEDNLSEGIREWWDLKPGAPKPKANQQKQDDGRGLVLPGYKYLGPFNGLDKGEPVNAADAAALEHDKAYDQQLKAGDNPYLRYNHADAEFQERLQEDTSFGGNLGRAVFQAKKRVLEPLGLVEEGAKTAPGKKRPVEQSPQEPDSSXLGIGKTGQQPAXKRLNFGQTGDSESVPDPQPLGEPPAAPSGVGSNTMASGGGAPMADNNEGADGVGNSSGNWHCDSTWLGDRVITTSTRTWALPTYNNHLYKQISNGTSGGSTNDNTYFGYSTPWGYFDFNRFHCHFSPRDWQRLINNNWGFRPKRLNFKLFNIQVKEVTTNEGTKTIANNLTSTVQVFTDSEYQLPYVLGSAHQGCLPPFPADVFMIPQYGYLTLNNGSQAVGRSSFYCLEYFPSQMLRTGNNFQFSYTFEDVPFHSSYAHSQSLDRLMNPLIDQYLYYLSRTQTTGTXGTQTLXFSQAGPSSMANQARNWVPGPCYRQQRVSTTTNQNNNSNFAWTGAXKXXLNGRDSLMNPGVAMASHKDDEDRFFPSSGVLIFGKQGAGNDNVDYSXVMITNEEEIKTTNPVATEEYGAVATNXQXLANTQAQTGLVHNQGVLPGMVWQNRDVYLQGPIWAKIPHTDGNFHPSPLMGGFGLKHPPPQILIKNTPVPADPPTTFNQAKLNSFITQYSTGQVSVEIEWELQKENSKRWNPEIQYTSNYYKSTNVDFAVNTEGVYSEPRPIGTRYLTRNL

SEQ ID NO: 1776 - DNA, 2211 bp, Artificial Sequence
  Description of Artificial Sequence: Synthetic polynucleotide
  misc_feature (469)..(471): n is a, c, g, or t
  misc_feature (502)..(504): n is a, c, g, or t
  misc_feature (1366)..(1368): n is a, c, g, or t
  misc_feature (1384)..(1386): n is a, c, g, or t
  misc_feature (1519)..(1521): n is a, c, g, or t
  misc_feature (1525)..(1530): n is a, c, g, or t
  misc_feature (1669)..(1671): n is a, c, g, or t
  misc_feature (1750)..(1752): n is a, c, g, or t
  misc_feature (1756)..(1758): n is a, c, g, or t
atggctgccgatggttatcttccagattggctcgaggacaacctctctgagggcattcgcgagtggtgggacttgaaacctggagccccgaaacccaaagccaaccagcaaaagcaggacgacggccggggtctggtgcttcctggctacaagtacctcggacccttcaacggactcgacaagggggagcccgtcaacgcggcggacgcagcggccctcgagcacgacaaagcctacgaccagcagctcaaagcgggtgacaatccgtacctgcggtataatcacgccgacgccgagtttcaggagcgtctgcaagaagatacgtcttttgggggcaacctcgggcgagcagtcttccaggccaagaagcgggttctcgaacctctcggtctggttgaggaaggcgctaagacggctcctggaaagaagaggccggtagagcagtcgccacaagagccagactcctccnnnggcatcggcaagacaggccagcagcccgctnnnaagagactcaattttggtcagactggcgactcagagtcagtccccgacccacaacctctcggagaacctccagcagccccctcaggtgtgggatctaatacaatggcttcaggcggtggcgctccaatggcagacaataacgaaggcgccgacggagtgggtaattcctcgggaaattggcattgcgattccacatggctgggggacagagtcatcaccaccagcacccgaacctgggccctgcccacctacaacaaccacctctacaagcaaatctccaacggcacctcgggaggaagcaccaacgacaacacctattttggctacagcaccccctgggggtattttgacttcaacagattccactgtcacttttcaccacgtgactggcaacgactcatcaacaacaattggggattccggcccaaaagactcaacttcaagctgttcaacatccaggtcaaggaagtcacgacgaacgaaggcaccaagaccatcgccaataatctcaccagcaccgtgcaggtctttacggactcggagtaccagttaccgtacgtgctaggatccgctcaccagggatgtctgcctccgttcccggcggacgtcttcatgattcctcagtacggctatttaactttaaacaatggaagccaagccgtgggacgttcctccttctactgtctggagtatttcccatcgcagatgctgagaaccggcaacaactttcagttcagctacaccttcgaggacgtgcctttccacagcagctacgcgcacagccagagcctggacaggctgatgaatcccctcatcgaccagtacctgtactacctgtccagaacgcaaacgactggaactnnngggacgcagactctgnnnttcagccaagcgggtcctagctcaatggccaaccaggctagaaattgggtgcccggaccttgctaccggcagcagcgcgtctccacgacaaccaaccagaacaacaacagcaactttgcctggacgggagctnnnaagnnnnnnctgaacggccgagactctctaatgaatccgggcgtggcaatggcttcccacaaggatgacgaggaccgcttcttcccttcgagcggggtcctgatttttggcaagcaaggagccgggaacgataatgtggattacagcnnngtgatgattacaaatgaggaagaaatcaagactaccaaccccgtggccacagaagaatatggagcagtggccaccaacnnncagnnngccaatacgcaggcgcagaccggactcgtgcacaaccagggggtgcttcccggcatggtgtggcagaatagagacgtgtacctgcagggtcccatctgggccaaaattcctcacacggacggcaactttcacccgtctcccctgatgggcggctttggactgaagcacccgcctcctcaaattctcatcaagaacacaccggttccagcggacccgccgactaccttcaaccaggccaagctgaactctttcatcacgcagtacagcaccggacaggtcagcgtggaaatcgagtgggagctgcagaaagaaaacagcaaacgctggaatccagagattcaatacacttccaactactacaaatctacaaatgtggactttgctgtcaacacggagggggtttatagcgagcctcgccccattggcacccgttacctcacccgcaacctgtaa

SEQ ID NO: 1777 - protein, 733 aa, Artificial Sequence; identical to SEQ ID NO: 423
  Description of Artificial Sequence: Synthetic polypeptide

SEQ ID NO: 1778 - DNA, 4472 bp, Artificial Sequence
  Description of Artificial Sequence: Synthetic polynucleotide
ctccatcactaggggtaaccgcgaagcgcctcccacgctgccgcgtcagcgctgacgtaaattacgtcataggggagtggtcctgtattagctgtcacgtgagtgcttttgcgacattttgcgacaccacgtggccattcatggtatatatggccgagtgagcgagcaggatctccattttgaccgcgaaatttgaacgagcagcagccatgccgggcttctacgagatcgtgcttaaggtgccgagcgacctggacgagcacctgccgggcatttctgactcgtttgtgaactgggtggcagagaaggaatgggagctgcccccggattctgacatggatcggaatctgattgagcaggcacccctgaccgtggccgagaagctacagcgcgacttcctggtccaatggcgccgcgtgagtaaggccccggaggccctcttctttgttcagttcgagaagggcgagtcctacttccacctccatattctggtagagaccacgggggtcaaatccatggtgctgggccgcttcctgagtcagattcgggacaagctggtgcagaccatctaccgcgggatcgagccgaccctgcccaactggttcgcggtgacaaagacgcgtaatggcgccggaggggggaacaaggtggtggacgagtgctacatccccaactacctgctgcccaagactcagcccgagctgcagtgggcgtggactaacatggaggagtatataagcgcgtgcttgaacctggccgagcgcaaacggctcgtggcgcagcacctgacccacgtcagccagacccaggagcagaacaaggagaatctgaacccgaattctgacgcgcctgtcatccggtcaaaaacctccgcgcgctacatggagctggtcgggtggctggtggaccggggcatcacctccgagaagcagtggatccaggaggaccaggcctcgtacatctccttcaacgccgcctccaactcgcggtctcagatcaaggccgcgctggacaatgccggcaagatcatggcgctgaccaaatccgcgcccgactacctggtaggccccgctctgcccgcggacattaaatccaaccgcatctaccgcatcctggagctgaatggctacgaccctgcctacgccggttccgtctttctcggctgggcccagaaaaagtttggcaaaaggaacaccatctggctgtttgggccggccaccacgggcaagaccaacatcgcggaagccatcgcccacgccgtgcccttctacggctgcgtcaactggaccaatgagaactttcccttcaacgattgcgtcgacaagatggtgatctggtgggaggagggcaagatgacggccaaggtcgtggagtccgccaaggccattctcggcggcagcaaggtgcgcgtggaccaaaagtgcaagtcgtccgcccagatcgatcccacccccgtgatcgtcacctccaacaccaacatgtgcgccgtgattgacgggaacagcaccaccttcgagcaccagcagccgttgcaggaccggatgttcaaatttgaacttacccgccgtctggagcacgactttggcaaggtgacaaagcaggaagtcaaagagttcttccgctgggcgcaggatcacgtgaccgaggtggcgcatgagttctacgtcagaaagggtggagctaacaaaagacccgcccccgatgacgcggatataagcgagcccaagcgggcctgcccctcagtcgcggatccatcgacgtcagacgcggaaggagctccggtggactttgccgacaggtaccaaaacaaatgttctcgtcacgcgggcatgcttcagatgctgtttccctgcaaaacatgcgagagaatgaatcagaatttcaacatttgcttcacgcacgggaccagagactgttcagaatgtttccctggcgtgtcagaatctcaaccggtcgtcagaaaaaagacgtatcggaaactctgtgcgattcatcatctgctggggcgggcacccgagattgcttgctcggcctgcgacctggtcaacgtggacctggatgactgtgtttctgagcaataaatgacttaaaccaggtatggctgccgatggttatcttccagattggctcgaggacaacctctctgagggcattcgcgagtggtgggacctgaaacctggagccccgaaacccaaagccaaccagcaaaagcaggacaacggccggggtctggtgcttcctggctacaagtacctcggacccttcaacggactcgacaagggggagcccgtcaacgcggcggacgcagcggccctcgagcacgacaaggcctacgaccagcagctccaagcgggtgacaatccgtacctgcggtataatcacgccgacgccgagtttcaggagcgtctgcaagaagatacgtcttttgggggcaacctcgggcgcgcagtcttccaggccaaaaagcgggttctcgaacctctgggcctggttgaatcgccggttaagacggctcctggaaagaagagaccggtagagccatcaccccagcgctctccagactcctctacgggcatcggcaagaaaggccagcagcccgcaaaaaagagactcaattttgggcagactggcgactcagagtcagtccccgaccctcaaccaatcggagaaccaccagcaggcccctctggtctgggatctggtacaatggctgcaggcggtggcgctccaatggcagacaataacgaaggcgccgacggagtgggtagttcctcaggaaattggcattgcgattccacatggctgggcgacagagtcatcaccaccagcacccgcacctgggccctgcccacctacaacaaccacctctacaagcaaatctccaacgggacctcgggaggaagcaccaacgacaacacctacttcggctacagcaccccctgggggtattttgacttcaacagattccactgccacttttcaccacgtgactggcagcgactcatcaacaacaactggggattccggcccaagaggctcaacttcaagctcttcaacatccaagtcaaggaggtcacgcagaatgaaggcaccaagaccatcgccaataaccttaccagcacgattcaggtctttacggactcggaataccagctcccgtacgtgctcggctcggcgcaccagggctgcctgcctccgttcccggcggacgtcttcatgattcctcagtacgggtacctgactctgaacaatggcagtcaggctgtgggccggtcgtccttctactgcctggagtactttccttctcaaatgctgagaacgggcaacaactttgaattcagctacaacttcgaggacgtgcccttccacagcagctacgcgcacagccagagcctggaccggctgatgaaccctctcatcgaccagtacttgtactacctgtcccggactcaaagcacgggcggtactgcaggaactcagcagttgctattttctcaggccgggcctaacaacatgtcggctcaggccaagaactggctacccggtccctgctaccggcagcaacgcgtctccacgacactgtcgcagaacaacaacagcaactttgcctggacgggtgccaccaagtatcatctgaatggcagagactctctggtgaatcctggcgttgccatggctacccacaaggacgacgaagagcgattttttccatccagcggagtcttaatgtttgggaaacagggagctggaaaagacaacgtggactatagcagcgtgatgctaaccagcgaggaagaaataaagaccaccaacccagtggccacagaacagtacggcgtggtggccgataacctgcaacagcaaaacgccgctcctattgtaggggccgtcaatagtcaaggagccttacctggcatggtgtggcagaaccgggacgtgtacctgcagggtcccatctgggccaagattcctcatacggacggcaactttcatccctcgccgctgatgggaggctttggactgaagcatccgcctcctcagatcctgattaaaaacacacctgttcccgcggatcctccgaccaccttcactaaggccaagctggcttctttcatcacgcagtacagtaccggccaggtcagcgtggagatcgagtgggagctgcagaaggagaacagcaaacgctggaacccagagattcagtacacttccaactactacaaatctacaaatgtggactttgctgtcaatactgagggtacttattccgagcctcgccccattggcacccgttacctcacccgtaatctgtaattacatgttaatcaataaaccggttaattcgtttcagttgaactttggtctcctgtccttcttatcttatcggttaccatagaaactggttacttattaactgcttggtgcgcttcgcgataaaagacttacgtcatcgggttacccctagtgatgga

SEQ ID NO: 1779 - DNA, 2208 bp, Artificial Sequence
  Description of Artificial Sequence: Synthetic polynucleotide
atggctgccgatggttatcttccagattggctcgaggacactctctctgaaggaataagacagtggtggaagctcaaacctggcccaccaccaccaaagcccgcagagcggcataaggacgacagcaggggtcttgtgcttcctgggtacaagtacctcggacccttcaacggactcgacaagggagagccggtcaacgaggcagacgccgcggccctcgagcacgacaaagcctacgaccggcagctcgacagcggagacaacccgtacctcaagtacaaccacgccgacgcggagtttcaggagcgccttaaagaagatacgtcttttgggggcaacctcggacgagcagtcttccaggcgaaaaagagggttcttgaacctctgggcctggttgaggaacctgttaagaaggctccgggaaaaaagaggccggtagagcactctcctgtggagccagactcctcctcgggaaccggaaaggcgggccagcagcctgcaagaaaaagattgaattttggtcagactggagacgcagactcagtacctgacccccagcctctcggacagccaccagcagccccctctggtctgggaactaataccatggctacaggcagtggcgcaccaatggcagacaataacgagggtgccgacggagtgggtaattcctcgggaaattggcattgcgattccacatggatgggcgacagagtcatcaccaccagcacccgaacctgggccctgcccacctacaacaaccacctctacaaacaaatttccagccaatcaggagcctcgaacgacaatcactactttggctacagcaccccttgggggtattttgacttcaacagattccactgccacttttcaccacgtgactggcaaagactcatcaacaacaactggggattccgacccaagagactcaacttcaagctctttaacattcaagtcaaagaggtcacgcagaatgacggtacgacgacgattgccaataaccttaccagcacggttcaggtgtttactgactcggagtaccagctcccgtacgtcctcggctcggcgcatcaaggatgcctcccgccgttcccagcagacgtcttcatggtgccacagtatggatacctcaccctgaacaacgggagtcaggcagtaggacgctcttcattttactgcctggagtactttccttctcagatgctgcgtaccggaaacaactttaccttcagctacacttttgaggacgttcctttccacagcagctacgctcacagccagagtctggaccgtctcatgaatcctctcatcgaccagtacctgtattacttgagcagaacaaacactccaagtggaaccaccacgcagtcaaggcttcagttttctcaggccggagcgagtgacattcgggaccagtctaggaactggcttcctggaccctgttaccgccagcagcgagtatcaaagacatctgcggataacaacaacagtgaatactcgtggactggagctaccaagtaccacctcaatggcagagactctctggtgaatccgggcccggctatggcaagccacaaggacgatgaagaaaagttttttcctcagagcggggttctcatctttgggaagcaaggctcagagaaaacaaatgtggacattgaaaaggtcatgattacagacgaagaggaaatcaggacaaccaatcccgtggctacggagcagtatggttctgtatctaccaacctccagagaggcaacagacaagcagctaccgcagatgtcaacacacaaggcgttcttccaggcatggtctggcaggacagagatgtgtaccttcaggggcccatctgggcaaagattccacacacggacggacattttcacccctctcccctcatgggtggattcggacttaaacaccctcctccacagattctcatcaagaacaccccggtgcctgcgaatccttcgaccaccttcagtgcggcaaagtttgcttccttcatcacacagtactccacgggacaggtcagcgtggagatcgagtgggagctgcagaaggaaaacagcaaacgctggaatcccgaaattcagtacacttccaactacaacaagtctgttaatgtggactttactgtggacactaatggcgtgtattcagagcctcgccccattggcaccagatacctgactcgtaatctgtaa

SEQ ID NO: 1780 - protein, 735 aa, Artificial Sequence
  Description of Artificial Sequence: Synthetic polypeptide
MAADGYLPDWLEDTLSEGIRQWWKLKPGPPPPKPAERHKDDSRGLVLPGYKYLGPFNGLDKGEPVNEADAAALEHDKAYDRQLDSGDNPYLKYNHADAEFQERLKEDTSFGGNLGRAVFQAKKRVLEPLGLVEEPVKKAPGKKRPVEHSPVEPDSSSGTGKAGQQPARKRLNFGQTGDADSVPDPQPLGQPPAAPSGLGTNTMATGSGAPMADNNEGADGVGNSSGNWHCDSTWMGDRVITTSTRTWALPTYNNHLYKQISSQSGASNDNHYFGYSTPWGYFDFNRFHCHFSPRDWQRLINNNWGFRPKRLNFKLFNIQVKEVTQNDGTTTIANNLTSTVQVFTDSEYQLPYVLGSAHQGCLPPFPADVFMVPQYGYLTLNNGSQAVGRSSFYCLEYFPSQMLRTGNNFTFSYTFEDVPFHSSYAHSQSLDRLMNPLIDQYLYYLSRTNTPSGTTTQSRLQFSQAGASDIRDQSRNWLPGPCYRQQRVSKTSADNNNSEYSWTGATKYHLNGRDSLVNPGPAMASHKDDEEKFFPQSGVLIFGKQGSEKTNVDIEKVMITDEEEIRTTNPVATEQYGSVSTNLQRGNRQAATADVNTQGVLPGMVWQDRDVYLQGPIWAKIPHTDGHFHPSPLMGGFGLKHPPPQILIKNTPVPANPSTTFSAAKFASFITQYSTGQVSVEIEWELQKENSKRWNPEIQYTSNYNKSVNVDFTVDTNGVYSEPRPIGTRYLTRNL

SEQ ID NO: 1781 - DNA, 8376 bp, Artificial Sequence
  Description of Artificial Sequence: Synthetic polynucleotide
aattcccatcatcaataatataccttattttggattgaagccaatatgataatgagggggtggagtttgtgacgtggcgcggggcgtgggaacggggcgggtgacgtagtagtctctagagtcctgtattagaggtcacgtgagtgttttgcgacattttgcgacaccatgtggtcacgctgggtatttaagcccgagtgagcacgcagggtctccattttgaagcgggaggtttgaacgcgcagccaccacgccggggttttacgagattgtgattaaggtccccagcgaccttgacgggcatctgcccggcatttctgacagctttgtgaactgggtggccgagaaggaatgggagttgccgccagattctgacatggatctgaatctgattgagcaggcacccctgaccgtggccgagaagctgcagcgcgactttctgacggaatggcgccgtgtgagtaaggccccggaggcccttttctttgtgcaatttgagaagggagagagctacttccacatgcacgtgctcgtggaaaccaccggggtgaaatccatggttttgggacgtttcctgagtcagattcgcgaaaaactgattcagagaatttaccgcgggatcgagccgactttgccaaactggttcgcggtcacaaagaccagaaatggcgccggaggcgggaacaaggtggtggatgagtgctacatccccaattacttgctccccaaaacccagcctgagctccagtgggcgtggactaatatggaacagtatttaagcgcctgtttgaatctcacggagcgtaaacggttggtggcgcagcatctgacgcacgtgtcgcagacgcaggagcagaacaaagagaatcagaatcccaattctgatgcgccggtgatcagatcaaaaacttcagccaggtacatggagctggtcgggtggctcgtggacaaggggattacctcggagaagcagtggatccaggaggaccaggcctcatacatctccttcaatgcggcctccaactcgcggtcccaaatcaaggctgccttggacaatgcgggaaagattatgagcctgactaaaaccgcccccgactacctggtgggccagcagcccgtggaggacatttccagcaatcggatttataaaattttggaactaaacgggtacgatccccaatatgcggcttccgtctttctgggatgggccacgaaaaagttcggcaagaggaacaccatctggctgtttgggcctgcaactaccgggaagaccaacatcgcggaggccatagcccacactgtgcccttctacgggtgcgtaaactggaccaatgagaactttcccttcaacgactgtgtcgacaagatggtgatctggtgggaggaggggaagatgaccgccaaggtcgtggagtcggccaaagccattctcggaggaagcaaggtgcgcgtggaccagaaatgcaagtcctcggcccagatagacccgactcccgtgatcgtcacctccaacaccaacatgtgcgccgtgattgacgggaactcaacgaccttcgaacaccagcagccgttgcaagaccggatgttcaaatttgaactcacccgccgtctggatcatgactttgggaaggtcaccaagcaggaagtcaaagactttttccggtgggcaaaggatcacgtggttgaggtggagcatgaattctacgtcaaaaagggtggagccaagaaaagacccgcccccagtgacgcagatataagtgagcccaaacgggtgcgcgagtcagttgcgcagccatcgacgtcagacgcggaagcttcgatcaactacgcagacaggtaccaaaacaaatgttctcgtcacgtgggcatgaatctgatgctgtttccctgcagacaatgcgagagaatgaatcagaattcaaatatctgcttcactcacggacagaaagactgtttagagtgctttcccgtgtcagaatctcaacccgtttctgtcgtcaaaaaggcgtatcagaaactgtgctacattcatcatatcatgggaaaggtgccagacgcttgcactgcctgcgatctggtcaatgtggatttggatgactgcatctttgaacaataaatgatttaaatcaggtatggctgccgatggttatcttccagattggctcgaggacactctctctgaaggaataagacagtggtggaagctcaaacctggcccaccaccaccaaagcccgcagagcggcataaggacgacagcaggggtcttgtgcttcctgggtacaagtacctcggacccttcaacggactcgacaagggagagccggtcaacgaggcagacgccgcggccctcgagcacgacaaagcctacgaccggcagctcgacagcggagacaacccgtacctcaagtacaaccacgccgacgcggagtttcaggagcgccttaaagaagatacgtcttttgggggcaacctcggacgagcagtcttccaggcgaaaaagagggttcttgaacctctgggcctggttgaggaacctgttaagacggctccgggaaaaaagaggccggtagagcactctcctgtggagccagactcctcctcgggaaccggaaaggcgggccagcagcctgcaagaaaaagattgaattttggtcagactggagacgcagactcagtacctgacccccagcctctcggacagccaccagcagccccctctggtctgggaactaatacgatggctacaggcagtggcgcaccaatggcagacaataacgagggcgccgacggagtgggtaattcctcgggaaattggcattgcgattccacatggatgggcgacagagtcatcaccaccagcacccgaacctgggccctgcccacctacaacaaccacctctacaaacaaatttccagccaatcaggagcctcgaacgacaatcactactttggctacagcaccccttgggggtattttgacttcaacagattccactgccacttttcaccacgtgactggcaaagactcatcaacaacaactggggattccgacccaagagactcaacttcaagctctttaacattcaagtcaaagaggtcacgcagaatgacggtacgacgacgattgccaataaccttaccagcacggttcaggtgtttactgactcggagtaccagctcccgtacgtcctcggctcggcgcatcaaggatgcctcccgccgttcccagcagacgtcttcatggtgccacagtatggatacctcaccctgaacaacgggagtcaggcagtaggacgctcttcattttactgcctggagtactttccttctcagatgctgcgtaccggaaacaactttaccttcagctacacttttgaggacgttcctttccacagcagctacgctcacagccagagtctggaccgtctcatgaatcctctcatcgaccagtacctgtattacttgagcagaacaaacactccaagtggaaccaccacgcagtcaaggcttcagttttctcaggccggagcgagtgacattcgggaccagtctaggaactggcttcctggaccctgttaccgccagcagcgagtatcaaagacatctgcggataacaacaacagtgaatactcgtggactggagctaccaagtaccacctcaatggcagagactctctggtgaatccgggcccggccatggcaagccacaaggacgatgaagaaaagttttttcctcagagcggggttctcatctttgggaagcaaggctcagagaaaacaaatgtggacattgaaaaggtcatgattacagacgaagaggaaatcaggacaaccaatcccgtggctacggagcagtatggttctgtatctaccaacctccagagaggcaacagacaagcagctaccgcagatgtcaacacacaaggcgttcttccaggcatggtctggcaggacagagatgtgtaccttcaggggcccatctgggcaaagattccacacacggacggacattttcacccctctcccctcatgggtggattcggacttaaacaccctcctccacagattctcatcaagaacaccccggtacctgcgaatccttcgaccaccttcagtgcggcaaagtttgcttccttcatcacacagtactccacgggacaggtcagcgtggagatcgagtgggagctgcagaaggaaaacagcaaacgctggaatcccgaaattcagtacacttccaactacaacaagtctgttaatgtggactttactgtggacactaatggcgtgtattcagagcctcgccccattggcaccagatacctgactcgtaatctgtaattgcttgttaatcaataaaccgtttaattcgtttcagttgaactttggtctctgcgtatttctttcttatctagtttccatgctctagagtcctgtattagaggtcacgtgagtgttttgcgacattttgcgacaccatgtggtcacgctgggtatttaagcccgagtgagcacgcagggtctccattttgaagcgggaggtttgaacgcgcagccaccacggcggggttttacgagattgtgattaaggtccccagcgaccttgacgggcatctgcccggcatttctgacagctttgtgaactgggtggccgagaaggaatgggagttgccgccagattctgacatggatctgaatctgattgagcaggcacccctgaccgtggccgagaagctgcatcgctggcgtaatagcgaagaggcccgcaccgatcgcccttcccaacagttgcgcagcctgaatggcgaatggaattccagacgattgagcgtcaaaatgtaggtatttccatgagcgtttttcctgttgcaatggctggcggtaatattgttctggatattaccagcaaggccgatagtttgagttcttctactcaggcaagtgatgttattactaatcaaagaagtattgcgacaacggttaatttgcgtgatggacagactcttttactcggtggcctcactgattataaaaacacttctcaggattctggcgtaccgttcctgtctaaaatccctttaatcggcctcctgtttagctcccgctctgattctaacgaggaaagcacgttatacgtgctcgtcaaagcaaccatagtacgcgccctgtagcggcgcattaagcgcggcgggtgtggtggttacgcgcagcgtgaccgctacacttgccagcgccctagcgcccgctcctttcgctttcttcccttcctttctcgccacgttcgccggctttccccgtcaagctctaaatcgggggctccctttagggttccgatttagtgctttacggcacctcgaccccaaaaaacttgattagggtgatggttcacgtagtgggccatcgccctgatagacggtttttcgccctttgacgttggagtccacgttctttaatagtggactcttgttccaaactggaacaacactcaaccctatctcggtctattcttttgatttataagggattttgccgatttcggcctattggttaaaaaatgagctgatttaacaaaaatttaacgcgaattttaacaaaatattaacgtttacaatttaaatatttgcttatacaatcttcctgtttttggggcttttctgattatcaaccggggtacatatgattgacatgctagttttacgattaccgttcatcgattctcttgtttgctccagactctcaggcaatgacctgatagcctttgtagagacctctcaaaaatagctaccctctccggcatgaatttatcagctagaacggttgaatatcatattgatggtgatttgactgtctccggcctttctcacccgtttgaatctttacctacacattactcaggcattgcatttaaaatatatgagggttctaaaaatttttatccttgcgttgaaataaaggcttctcccgcaaaagtattacagggtcataatgtttttggtacaaccgatttagctttatgctctgaggctttattgcttaattttgctaattctttgccttgcctgtatgatttattggatgttggaattcctgatgcggtattttctccttacgcatctgtgcggtatttcacaccgcatatggtgcactctcagtacaatctgctctgatgccgcatagttaagccagccccgacacccgccaacacccgctgacgcgccctgacgggcttgtctgctcccggcatccgcttacagacaagctgtgaccgtctccgggagctgcatgtgtcagaggttttcaccgtcatcaccgaaacgcgcgagacgaaagggcctcgtgatacgcctatttttataggttaatgtcatgataataatggtttcttagacgtcaggtggcacttttcggggaaatgtgcgcggaacccctatttgtttatttttctaaatacattcaaatatgtatccgctcatgagacaataaccctgataaatgcttcaataatattgaaaaaggaagagtatgagtattcaacatttccgtgtcgcccttattcccttttttgcggcattttgccttcctgtttttgctcacccagaaacgctggtgaaagtaaaagatgctgaagatcagttgggtgcacgagtgggttacatcgaactggatctcaacagcggtaagatccttgagagttttcgccccgaagaacgttttccaatgatgagcacttttaaagttctgctatgtggcgcggtattatcccgtattgacgccgggcaagagcaactcggtcgccgcatacactattctcagaatgacttggttgagtactcaccagtcacagaaaagcatcttacggatggcatgacagtaagagaattatgcagtgctgccataaccatgagtgataacactgcggccaacttacttctgacaacgatcggaggaccgaaggagctaaccgcttttttgcacaacatgggggatcatgtaactcgccttgatcgttgggaaccggagctgaatgaagccataccaaacgacgagcgtgacaccacgatgcctgtagcaatggcaacaacgttgcgcaaactattaactggcgaactacttactctagcttcccggcaacaattaatagactggatggaggcggataaagttgcaggaccacttctgcgctcggcccttccggctggctggtttattgctgataaatctggagccggtgagcgtgggtctcgcggtatcattgcagcactggggccagatggtaagccctcccgtatcgtagttatctacacgacggggagtcaggcaactatggatgaacgaaatagacagatcgctgagataggtgcctcactgattaagcattggtaactgtcagaccaagtttactcatatatactttagattgatttaaaacttcatttttaatttaaaaggatctaggtgaagatcctttttgataatctcatgaccaaaatcccttaacgtgagttttcgttccactgagcgtcagaccccgtagaaaagatcaaaggatcttcttgagatcctttttttctgcgcgtaatctgctgcttgcaaacaaaaaaaccaccgctaccagcggtggtttgtttgccggatcaagagctaccaactctttttccgaaggtaactggcttcagcagagcgcagataccaaatactgtccttctagtgtagccgtagttaggccaccacttcaagaactctgtagcaccgcctacatacctcgctctgctaatcctgttaccagtggctgctgccagtggcgataagtcgtgtcttaccgggttggactcaagacgatagttaccggataaggcgcagcggtcgggctgaacggggggttcgtgcacacagcccagcttggagcgaacgacctacaccgaactgagatacctacagcgtgagctatgagaaagcgccacgcttcccgaagggagaaaggcggacaggtatccggtaagcggcagggtcggaacaggagagcgcacgagggagcttccagggggaaacgcctggtatctttatagtcctgtcgggtttcgccacctctgacttgagcgtcgatttttgtgatgctcgtcaggggggcggagcctatggaaaaacgccagcaacgcggcctttttacggttcctggccttttgctggccttttgctcacatgttctttcctgcgttatcccctgattctgtggataaccgtattaccgcctttgagtgagctgataccgctcgccgcagccgaacgaccgagcgcagcgagtcagtgagcgaggaagcggaagagcgcccaatacgcaaaccgcctctccccgcgcgttggccgattcattaatgca

SEQ ID NO: 1782 - DNA, 1085 bp, Artificial Sequence
  Description of Artificial Sequence: Synthetic polynucleotide
  misc_feature (611)..(611): n is a, c, g, or t
  misc_feature (640)..(640): n is a, c, g, or t
  misc_feature (1039)..(1039): n is a, c, g, or t
tgcccacttacaacaaccatctctacaagcaaatctccagcvvmdcaggagctascaacgacaaccactactttggctacagcaccccttgggggtattttgactttaacagattccactgccacttctcaccacgtgactggcagcgactcattaacaacaactggggattccggcccaagaaactcagcttcaagctcttcaacatccaagttagaggggtcacgcagaacgatggcacgacgactattgccaataaccttaccagcacggttcaagtgtttacggactcggagtatcagctcccgtacgtgctcgggtcggcgcaccaaggctgtctcccgccgtttccagcggacgtcttcatggtccctcagtatggatacctcaccctgaacaacggaagtcaagcggtgggacgctcatccttttactgcctggagtacttcccttcgcagatgctaaggactggaaataacttccaattcagctataccttcgaggatgtaccttttcacagcagctacgctcacagccagagtttggatcgcttgatgaatcctcttattgatcagtatctgtactacctgaacagaacgcaargcamcvcnrgcggaacarccrvcmhsmrsvvsctgvngtttagccaggctgggcctcagtctatgtctttgcaggccagaaattggctacctgggccctgctaccggcaacagagactttcaamarycbmcrvcsrsaacaacaacagtrastttccttggmcagcggccagcamatatcatctcaatggccgcgactcgctggtgaatccaggaccagctatggccagtcacrrggacgatrmsgrsaratttttccctatgcacggcaatctaatatttggcaaasaarrcrscrvsrvarvcratrycgmsdwcgrsvrsgtaatgattacggatgaagaagagattcgtaccaccaatcctgtggcaacagagcagtatggaactgtggcaaataacttgcagrvsvvsmrsrvcvvscccacgdhtvvsrnsgtcvmscatcagggggccttacctggcatggtgtggcaagatcgt

SEQ ID NO: 1783 - protein, 620 aa, Artificial Sequence
  Description of Artificial Sequence: Synthetic polypeptide
  misc_feature (263)..(264): Xaa can be any naturally occurring amino acid
  misc_feature (267)..(267): Xaa can be any naturally occurring amino acid
  misc_feature (450)..(453): Xaa can be any naturally occurring amino acid
  misc_feature (456)..(460): Xaa can be any naturally occurring amino acid
  misc_feature (462)..(462): Xaa can be any naturally occurring amino acid
  misc_feature (491)..(495): Xaa can be any naturally occurring amino acid
  misc_feature (500)..(500): Xaa can be any naturally occurring amino acid
  misc_feature (504)..(504): Xaa can be any naturally occurring amino acid
  misc_feature (508)..(508): Xaa can be any naturally occurring amino acid
  misc_feature (528)..(528): Xaa can be any naturally occurring amino acid
  misc_feature (531)..(533): Xaa can be any naturally occurring amino acid
  misc_feature (546)..(557): Xaa can be any naturally occurring amino acid
  misc_feature (586)..(590): Xaa can be any naturally occurring amino acid
  misc_feature (593)..(595): Xaa can be any naturally occurring amino acid
  misc_feature (597)..(597): Xaa can be any naturally occurring amino acid
MAADGYLPDWLEDNLSEGIREWWALKPGVPQPKANQQHQDNRRGLVLPGYKYLGPGNGLDKGEPVNEADAAALEHDKAYDQQLKAGDNPYLKYNHADAEFQERLQEDTSFGGNLGRAVFQAKKRILEPLGLVEEAAKTAPGKKGAVDQSPQEPDSSSGVGKSGKQPARKRLNFGQTGDSESVPDPQPLGEPPAAPTSLGSNTMASGGGAPMADNNEGADGVGNSSGNWHCDSQWLGDRVITTSTRTWALPTYNNHLYKQISSXXGAXNDNHYFGYSTPWGYFDFNRFHCHFSPRDWQRLINNNWGFRPKKLSFKLFNIQVRGVTQNDGTTTIANNLTSTVQVFTDSEYQLPYVLGSAHQGCLPPFPADVFMVPQYGYLTLNNGSQAVGRSSFYCLEYFPSQMLRTGNNFQFSYTFEDVPFHSSYAHSQSLDRLMNPLIDQYLYYLNRTQXXXXGTXXXXXLXFSQAGPQSMSLQARNWLPGPCYRQQRLSXXXXXNNNSXFPWXAASXYHLNGRDSLVNPGPAMASHXDDXXXFFPMHGNLIFGKXXXXXXXXXXXXVMITDEEEIRTTNPVATEQYGTVANNLQXXXXXPTXXXVXHQGALPGMVWQDRDVYLQGPIWA

SEQ ID NO: 1784 - DNA, 1491 bp, Artificial Sequence
  Description of Artificial Sequence: Synthetic polynucleotide
accaccagcaccagaacctgggccctgcccacttacaacaaccatctctacaagcaaatctccagccaatcaggagcttcaaacgacaaccactactttggctacagcaccccttgggggtattttgactttaacagattccactgccacttctcaccacgtgactggcagcgactcattaacaacaactggggattccggcccaagaaactcagcttcaagctcttcaacatccaagttagaggggtcacgcagaacgatggcacgacgactattgccaataaccttaccagcacggttcaagtgtttacggactcggagtatcagctcccgtacgtgctcgggtcggcgcaccaaggctgtctcccgccgtttccagcggacgtcttcatggtccctcagtatggatacctcaccctgaacaacggaagtcaagcggtgggacgctcatccttttactgcctggagtacttcccttcgcagatgctaaggactggaaataacttccaattcagctataccttcgaggatgtaccttttcacagcagctacgctcacagccagagtttggatcgcttgatgaatcctcttattgatcagtatctgtactacctgaacagaacgcaaggaacaacctctggaacaaccaaccaatcacggctgctttttagccaggctgggcctcagtctatgtctttgcaggccagaaattggctacctgggccctgctaccggcaacagagactttcaaagactgctaacgacaacaacaacagtaactttccttggacagcggccagcaaatatcatctcaatggccgcgactcgctggtgaatccaggaccagctatggccagtcacaaggacgatgaagaaaaatttttccctatgcacggcaatctaatatttggcaaagaagggacaacggcaagtaacgcagaattagataatgtaatgattacggatgaagaagagattcgtaccaccaatcctgtggcaacagagcagtatggaactgtggcaaataacttgcagagctcaaatacagctcccacgactggaactgtcaatcatcagggggccttacctggcatggtgtggcaagatcgtgacgtctaccttcaaggacctatctgggcaaagattcctcacacggatggacactttcatccttctcctctgatgggaggctttggactgaaacatccgcctcctcaaatcatgatcaaaaatactccggtaccggcaaatcctccgacgactttcagcccggccaagtttgcttcatttatcactcagtactccactggacaggtcagcgtggaaattgagtgggagctacagaaagaaaacagcaaacgttggaatccagagattcagtacacttccaactacaacaagtctgttaatgtggactttactgtagacactaatggtgtttatagtgaacctcgccctattggaacccggtatctcacacgaaacttgtga

SEQ ID NO: 1785 - protein, 482 aa, Artificial Sequence
  Description of Artificial Sequence: Synthetic polypeptide
TTSTRTWALPTYNNHLYKQISSQSGASNDNHYFGYSTPWYFDFNRFHCHFSPRDWQRLNNNWGFRPKKLSFKLFNIQRGVTQNDGTTTIANNLTSTQVFTDSEYQLPYVLGSAHQCLPPFPADVFMVPQYGYLTNNGSQAVGRSSFYCLEYFPQMLRTGNNFQFSYTFEDVPHSSYAHSQSLDRLMNPLIDYLYYLNRTQGTTSGTTNQSLLFSQAGPQSMSLQARNWLGPCYRQQRLSKTANDNNNSFPWTAASKYHLNGRDSLVNGPAMASHKDDEEKFFPMHGLIFGKEGTTASNAELDNVMITDEEEIRTTNPVATEQYGTVANNLQSSNTAPTTGTVNHQGALPGMVWQDRDVYLQGPIWAKIPHTDGHFHPSPLMGGFGLKHPPPQIMIKNTPVPANPPTTFSPAKFASFITQYSTGQVSVEIEWELQKENSKRWNPEIQYTSNYNKSVNVDFTVDTNGVYSEPRPIGTRYLTRNL

SEQ ID NO: 1786 - DNA, 1140 bp, Artificial Sequence
  Description of Artificial Sequence: Synthetic polynucleotide
  misc_feature (636)..(636): n is a, c, g, or t
  misc_feature (665)..(665): n is a, c, g, or t
  misc_feature (1064)..(1064): n is a, c, g, or t
accaccagcaccagaacctgggccctgcccacttacaacaaccatctctacaagcaaatctccagcvvmdcaggagctascaacgacaaccactactttggctacagcaccccttgggggtattttgactttaacagattccactgccacttctcaccacgtgactggcagcgactcattaacaacaactggggattccggcccaagaaactcagcttcaagctcttcaacatccaagttagaggggtcacgcagaacgatggcacgacgactattgccaataaccttaccagcacggttcaagtgtttacggactcggagtatcagctcccgtacgtgctcgggtcggcgcaccaaggctgtctcccgccgtttccagcggacgtcttcatggtccctcagtatggatacctcaccctgaacaacggaagtcaagcggtgggacgctcatccttttactgcctggagtacttcccttcgcagatgctaaggactggaaataacttccaattcagctataccttcgaggatgtaccttttcacagcagctacgctcacagccagagtttggatcgcttgatgaatcctcttattgatcagtatctgtactacctgaacagaacgcaargcamcvcnrgcggaacarccrvcmhsmrsvvsctgvngtttagccaggctgggcctcagtctatgtctttgcaggccagaaattggctacctgggccctgctaccggcaacagagactttcaamarycbmcrvcsrsaacaacaacagtrastttccttggmcagcggccagcamatatcatctcaatggccgcgactcgctggtgaatccaggaccagctatggccagtcacrrggacgatrmsgrsaratttttccctatgcacggcaatctaatatttggcaaasaarrcrscrvsrvarvcratrycgmsdwcgrsvrsgtaatgattacggatgaagaagagattcgtaccaccaatcctgtggcaacagagcagtatggaactgtggcaaataacttgcagrvsvvsmrsrvcvvscccacgdhtvvsrnsgtcvmscatcagggggccttacctggcatggtgtggcaagatcgtgacgtctaccttcaaggacctatctgggca

SEQ ID NO: 1787 - protein, 620 aa, Artificial Sequence; identical to SEQ ID NO: 1783
  Description of Artificial Sequence: Synthetic polypeptide
  misc_feature (263)..(264): Xaa can be any naturally occurring amino acid
  misc_feature (267)..(267): Xaa can be any naturally occurring amino acid
  misc_feature (450)..(453): Xaa can be any naturally occurring amino acid
  misc_feature (456)..(460): Xaa can be any naturally occurring amino acid
  misc_feature (462)..(462): Xaa can be any naturally occurring amino acid
  misc_feature (491)..(495): Xaa can be any naturally occurring amino acid
  misc_feature (500)..(500): Xaa can be any naturally occurring amino acid
  misc_feature (504)..(504): Xaa can be any naturally occurring amino acid
  misc_feature (508)..(508): Xaa can be any naturally occurring amino acid
  misc_feature (528)..(528): Xaa can be any naturally occurring amino acid
  misc_feature (531)..(533): Xaa can be any naturally occurring amino acid
  misc_feature (546)..(557): Xaa can be any naturally occurring amino acid
  misc_feature (586)..(590): Xaa can be any naturally occurring amino acid
  misc_feature (593)..(595): Xaa can be any naturally occurring amino acid
  misc_feature (597)..(597): Xaa can be any naturally occurring amino acid

SEQ ID NO: 1788 - protein, 738 aa, Artificial Sequence; identical to SEQ ID NO: 7
  Description of Artificial Sequence: Synthetic polypeptide

SEQ ID NO: 1789 - DNA, 2258 bp, Artificial Sequence
  Description of Artificial Sequence: Synthetic polynucleotide
tcgaggacaacctctctgagggcattcgcgagtggtgggacttgaaacctggagccccgaaacccaaagccaaccagcaaaagcaggacgacggccggggtctggtgcttcctggctacaagtacctcggacccttcaacggactcgacaagggggagcccgtcaacgcggcggacgcagcggccctcgagcacgacaaggcctacgaccagcagctcaaagcgggtgacaatccgtacctgcggtataaccacgccgacgccgagtttcaggagcgtctgcaagaagatacgtcttttgggggcaacctcgggcgagcagtcttccaggccaagaagcgggttctcgaacctctcggtctggttgaggaaggcgctaagacggctcctggaaagaagagaccggtagagccatcaccccagcgttctccagactcctctacgggcatcggcaagaaaggccagcagcccgcgaaaaagagactcaactttgggcagactggcgactcagagtcagtgcccgaccctcaaccaatcggagaaccccccgcaggcccctctggtctgggatctggtacaatggctgcaggcggtggcgctccaatggcagacaataacgaaggcgccgacggagtgggtagttcctcaggaaattggcattgcgattccacatggctgggcgacagagtcatcaccaccagcacccgaacctgggccctccccacctacaacaaccacctctacaagcaaatctccaacgggacttcgggaggaagcaccaacgacaacacctacttcggctacagcaccccctgggggtattttgactttaacagattccactgccacttctcaccacgtgactggcagcgactcatcaacaacaactggggattccggcccaagagactcaacttcaagctcttcaacatccaggtcaaggaggtcacgcagaatgaaggcaccaagaccatcgccaataaccttaccagcacgattcaggtctttacggactcggaataccagctcccgtacgtcctcggctctgcgcaccagggctgcctgcctccgttcccggcggacgtcttcatgattcctcagtacgggtacctgactctgaacaatggcagtcaggccgtgggccgttcctccttctactgcctggagtactttccttctcaaatgctgagaacgggcaacaactttgagttcagctaccagtttgaggacgtgccttttcacagcagctacgcgcacagccaaagcctggaccggctgatgaaccccctcatcgaccagtacctgtactacctgtctcggactcagtccacgggaggtaccgcaggaactcagcagttgctattttctcaggccgggcctaataacatgtcggctcaggccaaaaactggctacccgggccctgctaccggcagcaacgcgtctccacgacactgtcgcaaaataacaacagcaactttgcctggaccggtgccaccaagtatcatctgaatggcagagactctctggtaaatcccggtgtcgctatggcaacccacaaggacgacgaagagcgattttttccgtccagcggagtcttaatgtttgggaaacagggagctggaaaagacaacgtggactatagcagcgttatgctaaccagtgaggaagaaattaaaaccaccaacccagtggccacagaacagtacggcgtggtggccgataacctgcaacagcaaaacgccgctcctattgtaggggccgtcaacagtcaaggagccttacctggcatggtctggcagaaccgggacgtgtacctgcagggtcctatctgggccaagattcctcacacggacggaaactttcatccctcgccgctgatgggaggctttggactgaaacacccgcctcctcagatcctgattaagaatacacctgttcccgcggatcctccaactaccttcagtcaagctaagctggcgtcgttcatcacgcagtacagcaccggacaggtcagcgtggaaattgaatgggagctgcagaaagaaaacagcaaacgctggaacccagagattcaatacacttccaactactacaaatctacaaatgtggactttgctgttaacacagatggcacttattctgagcctcgccccatcggcacccgttacctcacccgtaatctgtaattgcttgttaatcaataaaccggttgattcgtttcagttgaactttggtctctgcgaagggcgaattcgttt

SEQ ID NO: 1790 - DNA, 2208 bp, Artificial Sequence
  Description of Artificial Sequence: Synthetic polynucleotide
atggctgccgatggttatcttccagattggctcgaggacactctctctgaaggaataagacagtggtggaagctcaaacctggcccaccaccaccaaagcccgcagagcggcataaggacgacagcaggggtcttgtgcttcctgggtacaagtacctcggacccttcaacggactcgacaagggagagccggtcaacgaggcagacgccgcggccctcgagcacgacaaagcctacgaccggcagctcgacagcggagacaacccgtacctcaagtacaaccacgccgacgcggagtttcaggagcgccttaaagaagatacgtcttttgggggcaacctcggacgagcagtcttccaggcgaaaaagagggttcttgaacctctgggcctggttgaggaacctgttaagacggctccgggaaaaaagaggccggtagagcactctcctgtggagccagactcctcctcgggaaccggaaaggcgggccagcagcctgcaagaaaaagattgaattttggtcagactggagacgcagactcagtacctgacccccagcctctcggacagccaccagcagccccctctggtctgggaactaatacgatggctacaggcagtggcgcaccaatggcagacaataacgagggcgccgacggagtgggtaattcctcgggaaattggcattgcgattccacatggatgggcgacagagtcatcaccaccagcacccgaacctgggccctgcccacctacaacaaccacctctacaaacaaatttccagccaatcaggagcctcgaacgacaatcactactttggctacagcaccccttgggggtattttgacttcaacagattccactgccacttttcaccacgtgactggcaaagactcatcaacaacaactggggattccgacccaagagactcaacttcaagctctttaacattcaagtcaaagaggtcacgcagaatgacggtacgacgacgattgccaataaccttaccagcacggttcaggtgtttactgactcggagtaccagctcccgtacgtcctcggctcggcgcatcaaggatgcctcccgccgttcccagcagacgtcttcatggtgccacagtatggatacctcaccctgaacaacgggagtcaggcagtaggacgctcttcattttactgcctggagtactttccttctcagatgctgcgtaccggaaacaactttaccttcagctacacttttgaggacgttcctttccacagcagctacgctcacagccagagtctggaccgtctcatgaatcctctcatcgaccagtacctgtatttcttaagcagaacaaacactccaagtggaaccaccacgcagtcaaggcttcagttttctcaggccggagcgagtgacattcgggaccagtctaggaactggcttcctggaccctgttaccgccagcagcgagtatcaaagacatctgcggataacaacaacagtgaattctcgtggaccggtgctaccaagtaccacctcaatggcagagactctctggtgaatccgggcccggccatggcaagccacaaggacgatgaagaaaagttttttcctcagagcggggttctcatctttgggaagcaaggctcagagaaaacaaatgtggacattgaaaaggtcatgattacagacgaagaggaaatcaggacaaccaatcccgtggctacggagcagtatggttctgtatctaccaacctccagagaggcaacagacaagcagctaccgcagatgtcaacacacaaggcgttcttccaggcatggtctggcaggacagagatgtgtaccttcaggggcccatctgggcaaagattccacacacggacggacattttcacccctctcccctcatgggtggattcggacttaaacaccctcctccacagattctcatcaagaacaccccggtacctgcgaatccttcgaccaccttcagtgcggcaaagtttgcttccttcatcacacagtactccacgggacaggtcagcgtggagatcgagtgggagctgcagaaggaaaacagcaaacgctggaatcccgaaattcagtacacttccaactacaacaagtctgttaatgtggactttactgtggacactaatggcgtgtattcagagcctcgccccattggtaccagattcctgactcgtaatctgtaa

SEQ ID NO: 1791 - protein, 737 aa, Artificial Sequence
  Description of Artificial Sequence: Synthetic polypeptide
MAADGYLPDWLEDNLSEGIREWWDLKPGAPKPKANQQKQDNGRGLVLPGYKYLGPFNGLDKGEPVNAADAAALEHDKAYDQQLQAGDNPYLRYNHADAEFQERLQEDTSFGGNLGRAVFQAKKRVLEPLGLVESPVKTAPGKKRPVEPSPQRSPDSSTGIGKKGQQPAKKRLNFGQTGDSESVPDPQPIGEPPAAPSGVGPNTMAAGGGAPMADNNEGADGVGSSSGNWHCDSTWLGDRVITTSTRTWALPTYNNHLYKQISNGTSGGSTNDNTYFGYSTPWGYFDFNRFHCHFSPRDWQRLINNNWGFRPKRLNFKLFNIQVKEVTQNEGTKTIANNLTSTIQVFTDSEYQLPYVLGSAHQGCLPPFPADVFMIPQYGYLTLNNGSQAVGRSSFYCLEYFPSQMLRTGNNFEFSYNFEDVPFHSSYAHSQSLDRLMNPLIDQYLYYLSRTQSTGGTAGTQQLLFSQAGPNNMSAQAKNWLPGPCYRQQRVSTTLSQNNNSNFAWTGATKYHLNGRDSLVNPGVAMATHKDDEERFFPSSGVLMFGKQGAGKDNVDYSSVMLTSEEEIKTTNPVATEQYGWADNLQQQNAAPIVGAVNSQGALPGMVWQNRDVYLQGPIWAKIPHTDGNFHPSPLMGGFGLKHPPPQILIKNTPVPADPPTTFNQAKLASFITQYSTGQVSVEIEWELQKENSKRWNPEIQYTSNYYKSTNVDFAVNTEGTYSEPRPIGTRYLTRNL

SEQ ID NO: 1792 - DNA, 2211 bp, Artificial Sequence
  Description of Artificial Sequence: Synthetic polynucleotide
atggctgccgatggttatcttccagattggctcgaggacactctctctgaaggaataagacagtggtggaagctcaaacctggcccaccaccaccaaagcccgcagagcggcataaggacgacagcaggggtcttgtgcttcctgggtacaagtacctcggacccttcaacggactcgacaagggagagccggtcaacgaggcagacgccgcggccctcgagcacgacaaagcctacgaccggcagctcgacagcggagacaacccgtacctcaagtacaaccacgccgacgcggagtttcaggagcgccttaaagaagatacgtcttttgggggcaacctcggacgagcagtcttccaggcgaaaaagagggttcttgaacctctgggcctggttgaggaacctgttaagacggctccgggaaaaaagaggccggtagagcactctcctgtggagccagactcctcctcgggaaccggaaaggcgggccagcagcctgcaagaaaaagattgaattttggtcagactggagacgcagactcagtacctgacccccagcctctcggacagccaccagcagccccctctggtctgggaactaatacgatggctacaggcagtggcgcaccaatggcagacaataacgagggcgccgacggagtgggtaattcctcgggaaattggcattgcgattccacatggatgggcgacagagtcatcaccaccagcacccgaacctgggccctgcccacctacaacaaccacctctacaaacaaatttccagcgcttcaacgggagcctcgaacgacaatcactactttggctacagcaccccttgggggtattttgacttcaacagattccactgccacttttcaccacgtgactggcaaagactcatcaacaacaactggggattccgacccaagagactcaacttcaagctctttaacattcaagtcaaagaggtcacgcagaatgacggtacgacgacgattgccaataaccttaccagcacggttcaggtgtttactgactcggagtaccagctcccgtacgtcctcggctcggcgcatcaaggatgcctcccgccgttcccagcagacgtcttcatggtgccacagtatggatacctcaccctgaacaacgggagtcaggcagtaggacgctcttcattttactgcctggagtactttccttctcagatgctgcgtaccggaaacaactttaccttcagctacacttttgaggacgttcctttccacagcagctacgctcacagccagagtctggaccgtctcatgaatcctctcatcgaccagtacctgtattacttgagcagaacaaacactccaagtggaaccaccacgcagtcaaggcttcagttttctcaggccggagcgagtgacattcgggaccagtctaggaactggcttcctggaccctgttaccgccagcagcgagtatcaaagacatctgcggataacaacaacagtgaatactcgtggactggagctaccaagtaccacctcaatggcagagactctctggtgaatccgggcccggccatggcaagccacaaggacgatgaagaaaagttttttcctcagagcggggttctcatctttgggaagcaaggctcagagaaaacaaatgtggacattgaaaaggtcatgattacagacgaagaggaaatcaggacaaccaatcccgtggctacggagcagtatggttctgtatctaccaacctccagagaggcaacagacaagcagctaccgcagatgtcaacacacaaggcgttcttccaggcatggtctggcaggacagagatgtgtaccttcaggggcccatctgggcaaagattccacacacggacggacattttcacccctctcccctcatgggtggattcggacttaaacaccctcctccacagattctcatcaagaacaccccggtacctgcgaatccttcgaccaccttcagtgcggcaaagtttgcttccttcatcacacagtactccacgggacaggtcagcgtggagatcgagtgggagctgcagaaggaaaacagcaaacgctggaatcccgaaattcagtacacttccaactacgccaagtctgtcaatgtggactttactgtggacaataatggcgtgtattcagagcctcgccccattggcaccagatacctgactcgtaatctgtaa

SEQ ID NO: 1793 - DNA, 2208 bp, Artificial Sequence
  Description of Artificial Sequence: Synthetic polynucleotide
atggctgccgatggttatcttccagattggctcgaggacaacctctctgagggcattcgcgagtggtgggacttgaaacctggagccccgaagcccaaagccaaccagcaaaagcaggacgacggccggggtctggtgcttcctggctacaagtacctcggacccttcaacggactcgacaagggggagcccgtcaacgcggcggacgcagcggccctcgagcacgacaaggcctacgaccagcagctcaaagcgggtgacaatccgtacctgcggtataaccacgccgacgccgagtttcaggagcgtctgcaagaagatacgtcttttgggggcaacctcgggcgagcagtcttccaggccaagaagcgggttctcgaacctctcggtctggttgaggaaggcgctaagacggctcctggaaagaaacgtccggtagagcagtcgccacaagagccagactcctcctcgggcatcggcaagacaggccagcagcccgctaaaaagagactcaattttggtcagactggcgactcagagtcagtccccgatccacaacctctcggagaacctccagcaacccccgctgctgtgggacctactacaatggcttcaggcggtggcgcaccaatggcagacaataacgaaggcgccgacggagtgggtaatgcctcaggaaattggcattgcgattccacatggctgggcgacagagtcatcaccaccagcacccgcacctgggccttgcccacctacaataaccacctctacaagcaaatctccagtgcttcaggggccagcaacgacaaccactacttcggctacagcaccccctgggggtattttgatttcaacagattccactgccacttttcaccacgtgactggcagcgactcatcaacaacaattggggattccggcccaagagactcaacttcaaactcttcaacatccaagtcaaggaggtcacgacgaatgatggcgtcacaaccatcgctaataaccttaccagcacggttcaagtcttctcggactcggagtaccagcttccgtacgtcctcggctctgcgcaccagggctgcctccctccgttcccggcggacgtgttcatgattccgcaatacggctacctgacgctcaacaatggcagccaagccgtgggacgttcatccttttactgcctggaatatttcccttctcagatgctgagaacgggcaacaactttaccttcagctacacctttgaggaagtgcctttccacagcagctacgcgcacagccagagcctggaccggctgatgaatcctctcatcgaccaatacctgtattacctgaacagaactcaaaatcagtccggaagtgcccaaaacaaggacttgctgtttagccgtgggtctccagctggcatgtctgttcagcccaaaaactggctacctggaccctgttatcggcagcagcgcgtttctaaaacaaaaacagacaacaacaacagcaattttacctggactggtgcttcaaaatataacctcaatgggcgtgaatccatcatcaaccctggcactgctatggcctcacacaaagacgacgaagacaagttctttcccatgagcggtgtcatgatttttggaaaagagagcgccggagcttcaaacactgcattggacaatgtcatgattacagacgaagaggaaattaaagccactaaccctgtggccaccgaaagatttgggaccgtggcagtcaatttccagagcagcagcacagaccctgcgaccggagatgtgcatgctatgggagcattacctggcatggtgtggcaagatagagacgtgtacctgcagggtcccatttgggccaaaattcctcacacagatggacactttcacccgtctcctcttatgggcggctttggactcaagaacccgcctcctcagatcctcatcaaaaacacgcctgttcctgcgaatcctccggcggagttttcagctacaaagtttgcttcattcatcacccaatactccacaggacaagtgagtgtggaaattgaatgggagctgcagaaagaaaacagcaagcgctggaatcccgaagtgcagtacacatccaattatgcaaaatctgccaacgttgattttactgtggacaacaatggactttatactgagcctcgccccattggcacccgttaccttacccgtcccctgtaa

SEQ ID NO: 1794 - DNA, 2205 bp, Artificial Sequence
  Description of Artificial Sequence: Synthetic polynucleotide
atggctgccgatggttatcttccagattggctcgaggacaacctctdgagggcattcgcgagtggtgggacttgaaacctggagccccgaaacccaaagccaaccagcaaaagcaggacgacggccggggtdggtgcttcctggctacaagtacctcggacccttcaacggactcgacaagggggagcccgtcaacgcggcggatgcagcggccctcgagcacgacaaggcctacgaccagcagctcaaagcgggtgacaatccgtacctgcggtataaccacgccgacgccgagtttcaggagcgtctgcaagaagatacgtcttttgggggcaacctcgggcgagcagtcttccaggccaagaagagggttctcgaaccttttggtdggttgaggaaggtgctaagacggctcctggaaagaaacgtccggtagagcagtcgccacaagagccagactcctcctcgggcattggcaagacaggccagcagcccgctaaaaagagactcaattttggtcagactggcgactcagagtcagtccccgacccacaacctctcggagaacctccagcaacccccgctgctgtgggacctactacaatggcttcaggcggtggcgcaccaatggcagacaataacgaaggcgccgacggagtgggtaatgcctcaggaaattggcattgcgattccacatggctgggcgacagagtcatcaccaccagcacccgaacatgggccttgcccacctataacaaccacctctacaagcaaatctccagtgcttcaggggccagcaacgacaaccactacttcggctacagcaccccctgggggtattttgatttcaacagattccactgccatttctcaccacgtgactggcagcgactcatcaacaacaattggggattccggcccaagagactcaacttcaagctcttcaacatccaagtcaaggaggtcacgacgaatgatggcgtcacgaccatcgctaataaccttaccagcacggttcaagtcttctcggactcggagtaccagttgccgtacgtcctcggctctgcgcaccagggctgcctccctccgttcccggcggacgtgttcatgattccgcagtacggctacctaacgctcaacaatggcagccaggcagtgggacggtcatccttttactgcctggaatatttcccatcgcagatgctgagaacgggcaataactttaccttcagctacaccttcgaggacgtgcctttccacagcagctacgcgcacagccagagcctggaccggctgatgaatcctctcatcgaccagtacctgtattacctgaacagaactcagaatcagtccggaagtgcccaaaacaaggacttgctgtttagccgggggtctccagctggcatgtctgttcagcccaaaaactggctacctggaccctgttaccggcagcagcgcgtttctaaaacaaaaacagacaacaacaacagcaactttacctggactggtgcttcaaaatataaccttaatgggcgtgaatctataatcaaccctggcactgctatggcctcacacaaagacgacaaagacaagttctttcccatgagcggtgtcatgatttttggaaaggagagcgccggagcttcaaacactgcattggacaatgtcatgatcacagacgaagaggaaatcaaagccactaaccccgtggccaccgaaagatttgggactgtggcagtcaatctccagagcagcagcacagaccctgcgaccggagatgtgcatgttatgggagccttacctggaatggtgtggcaagacagagacgtatacctgcagggtcctatttgggccaaaattcctcacacggatggacactttcacccgtctcctctcatgggcggctttggacttaagcacccgcctcctcagatcctcatcaaaaacacgcctgttcctgcgaatcctccggcagagttttcggctacaaagtttgcttcattcatcacccagtattccacaggacaagtgagcgtggagattgaatgggagctgcagaaagaaaacagcaaacgctggaatcccgaagtgcagtatacatctaactatgcaaaatctgccaacgttgatttcactgtggacaacaatggactttatactgagcctcgccccattggcacccgttacctcacccgtcccctgtaa

SEQ ID NO: 1795 - DNA, 2208 bp, Artificial Sequence
  Description of Artificial Sequence: Synthetic polynucleotide
atggctgccgatggttatcttccagattggctcgaggacaacctctctgagggcattcgcgagtggtgggacttgaaacctggagccccgaaacccaaagccaaccagcaaaagcaggacgacggccggggtctggtgcttcctggctacaagtacctcggacccttcaacggactcgacaagggggagcccgtcaacgcggcggatgcagcggccctcgagcacgacaaggcctacgaccagcagctcaaagcgggtgacaatccgtacctgcggtataaccacgccgacgccgagtttcaggagcgtctgcaagaagatacgtcttttgggggcaacctcgggcgagcagtcttccaggccaagaagagggttctcgaaccttttggtctggttgaggaaggtgctaagacggctcctggaaagaaacgtccggtagagcagtcgccacaagagccagactcctcctcgggcattggcaagacaggccagcagcccgctaaaaagagactcaattttggtcagactggcgactcagagtcagtccccgacccacaacctctcggagaacctccagcaacccccgctgctgtgggacctactacaatggcttcaggcggtggcgcaccaatggcagacaataacgaaggcgccgacggagtgggtaatgcctcaggaaattggcattgcgattccacatggctgggcgacagagtcatcaccaccagcacccgaacatgggccttgcccacctataacaaccacctctacaagcaaatctccagtgcttcaggggccagcaacgacaaccactacttcggctacagcaccccctgggggtattttgatttcaacagattccactgccatttctcaccacgtgactggcagcgactcatcaacaacaattggggattccggcccaagagactcaacttcaagctcttcaacatccaagtcaaggaggtcacgacgaatgatggcgtcacgaccatcgctaataaccttaccagcacggttcaagtcttctcggactcggagtaccagttgccgtacgtcctcggctctgcgcaccagggctgcctccctccgttcccggcggacgtgttcatgattccgcagtacggctacctaacgctcaacaatggcagccaggcagtgggacggtcatccttttactgcctggaatatttcccatcgcagatgctgagaacgggcaataactttaccttcagctacaccttcgaggacgtgcctttccacagcagctacgcgcacagccagagcctggaccggctgatgaatcctctcatcgaccagtacctgtattacctgaacagaactcagaatcagtccggaagtgcccaaaacaaggacttgctgtttagccgggggtctccagctggcatgtctgttcagcccaaaaactggctacctggaccctgttaccggcagcagcgcgtttctaaaacaaaaacagacaacaacaacagcaactttacctggactggtgcttcaaaatataaccttaatgggcgtgaatctataatcaaccctggcactgctatggcctcacacaaagacgacgaagacaagttctttcccatgagcggtgtcatgatttttggaaaggagagcgccggagcttcaaacactgcattggacaatgtcatgatcacagacgaagaggaaatcaaagccactaaccccgtggccaccgaaagatttgggactgtggcagtcaatctccagagcagcagcacagaccctgcgaccggagatgtgcatgttatgggagccttacctggaatggtgtggcaagacagagacgtatacctgcagggtcctatttgggccaaaattcctcacacggatggacactttcacccgtctcctctcatgggcggctttggacttaagcacccgcctcctcagatcctcatcaaaaacacgcctgttcctgcgaatcctccggcagagttttcggctacaaagtttgcttcattcatcacccagtattccacaggacaagtgagcgtggagattgaatgggagctgcagaaagaaaacagcaaacgctggaatcccgaagtgcagtatacatctaactatgcaaaatctgccaacgttgatttcactgtggacaacaatggactttatactgagcctcgccccattggcacccgttacctcacccgtcccctgtaa

SEQ ID NO: 1796 - DNA, 2208 bp, Artificial Sequence
  Description of Artificial Sequence: Synthetic polynucleotide
atggctgccgatggttatcttccagattggctcgaggacactctctctgaaggaataagacagtggtggaagctcaaacctggcccaccaccaccaaagcccgcagagcggcataaggacgacagcaggggtcttgtgcttcctgggtacaagtacctcggacccttcaacggactcgacaagggagagccggtcaacgaggcagacgccgcggccctcgagcacgacaaagcctacgaccggcagctcgacagcggagacaacccgtacctcaagtacaaccacgccgacgcggagtttcaggagcgccttaaagaagatacgtcttttgggggcaacctcggacgagcagtcttccaggcgaaaaagagggttcttgaacctctgggcctggttgaggaacctgttaagacggctccgggaaaaaagaggccggtagagcactctcctgtggagccagactcctcctcgggaaccggaaaggcgggccagcagcctgcaagaaaaagattgaattttggtcagactggagacgcagactcagtacctgacccccagcctctcggacagccaccagcagccccctctggtctgggaactaatacgatggctacaggcagtggcgcaccaatggcagacaataacgagggcgccgacggagtgggtaattcctcgggaaattggcattgcgattccacatggatgggcgacagagtcatcaccaccagcacccgaacctgggccctgcccacctacaacaaccacctctacaaacaaatttccagccaatcaggagcctcgaacgacaatcactactttggctacagcaccccttgggggtattttgacttcaacagattccactgccacttttcaccacgtgactggcaaagactcatcaacaacaactggggattccgacccaagagactcaacttcaagctctttaacattcaagtcaaagaggtcacgcagaatgacggtacgacgacgattgccaataaccttaccagcacggttcaggtgtttactgactcggagtaccagctcccgtacgtcctcggctcggcgcatcaaggatgcctcccgccgttcccagcagacgtcttcatggtgccacagtatggatacctcaccctgaacaacgggagtcaggcagtaggacgctcttcattttactgcctggagtactttccttctcagatgctgcgtaccggaaacaactttaccttcagctacacttttgaggacgttcctttccacagcagctacgctcacagccagagtctggaccgtctcatgaatcctctcatcgaccagtacctgtattacttgagcagaacaaacactccaagtggaaccaccacgcagtcaaggcttcagttttctgtggccggacccagtaacatggctgtccagggaaggaactggcttcctggaccctgttaccgccagcagcgagtatcaaagacatctgcggataacaacaacagtgaatttgcttggactggagctaccaagtaccacctcaatggcagagactctctggtgaatccgggcccggccatggcaagccacaaggacgatgaagaaaagttttttcctcagagcggggttctcatctttgggaagcaaggctcagagaaaacaaatgtggacattgaaaaggtcatgattacagacgaagaggaaatcaggacaaccaatcccgtggctacggagcagtatggttctgtatctaccaacctccagcaacagaacacagcaccagctaccgcagatgtcaacacacaaggcgttcttccaggcatggtctggcaggacagagatgtgtaccttcaggggcccatctgggcaaagattccacacacggacggacattttcacccctctcccctcatgggtggattcggacttaaacaccctcctccacagattctcatcaagaacaccccggtacctgcgaatccttcgaccaccttcagtgcggcaaagtttgcttccttcatcacacagtactccacgggacaggtcagcgtggagatcgagtgggagctgcagaaggaaaacagcaaacgctggaatcccgaaattcagtacacttccaactacaacaagtctgttaatgtggactttactgtggacactaatggcgtgtattcagagcctcgccccattggcaccagatacctgactcgtaatctgtaa

SEQ ID NO: 1797 - protein, 735 aa, Artificial Sequence
  Description of Artificial Sequence: Synthetic polypeptide
MAADGYLPDWLEDTLSEGIRQWWKLKPGPPPPKPAERHKDDSRGLVLPGYKYLGPFNGLDKGEPVNEADAAALEHDKAYDRQLDSGDNPYLKYNHADAEFQERLKEDTSFGGNLGRAVFQAKKRVLEPLGLVEEPVKTAPGKKRPVEHSPVEPDSSSGTGKAGQQPARKRLNFGQTGDADSVPDPQPLGQPPAAPSGLGTNTMATGSGAPMADNNEGADGVGNSSGNWHCDSTWMGDRVITTSTRTWALPTYNNHLYKQISSQSGASNDNHYFGYSTPWGYFDFNRFHCHFSPRDWQRLINNNWGFRPKRLNFKLFNIQVKEVTQNDGTTTIANNLTSTVQVFTDSEYQLPYVLGSAHQGCLPPFPADVFMVPQYGYLTLNNGSQAVGRSSFYCLEYFPSQMLRTGNNFTFSYTFEDVPFHSSYAHSQSLDRLMNPLIDQYLYYLSRTNTPSGTTTQSRLQFSVAGPSNMAVQGRNWLPGPCYRQQRVSKTSADNNNSEFAWTGATKYHLNGRDSLVNPGPAMASHKDDEEKFFPQSGVLIFGKQGSEKTNVDIEKVMITDEEEIRTTNPVATEQYGSVSTNLQQQNTAPATADVNTQGVLPGMVWQDRDVYLQGPIWAKIPHTDGHFHPSPLMGGFGLKHPPPQILIKNTPVPANPSTTFSAAKFASFITQYSTGQVSVEIEWELQKENSKRWNPEIQYTSNYNKSVNVDFTVDTNGVYSEPRPIGTRYLTRNL

SEQ ID NO: 1798 - DNA, 2208 bp, Artificial Sequence
  Description of Artificial Sequence: Synthetic polynucleotide
atggctgccgatggttatcttccagattggctcgaggacactctctctgaaggaataagacagtggtggaagctcaaacctggcccaccaccaccaaagcccgcagagcggcataaggacgacagcaggggtcttgtgcttcctgggtacaagtacctcggacccttcaacggactcgacaagggagagccggtcaacgaggcagacgccgcggccctcgagcacgacaaagcctacgaccggcagctcgacagcggagacaacccgtacctcaagtacaaccacgccgacgcggagtttcaggagcgccttaaagaagatacgtcttttgggggcaacctcggacgagcagtcttccaggcgaaaaagaggattcttgaacctctgggcctggttgaggaacctgttaagacggctccgggaaaaaagaggccggtagagcactctcctgcggagccagactcctcctcgggaaccggaaagtcgggccagcagcctgcaagaaaaagattgaattttggtcagactggagacgcagactcagtacctgacccccagcctctcggacagccaccagcagccccctctggtctgggaactaatacgatggcttcaggcagtggcgcaccaatggcagacaataacgagggcgccgacggagtgggtaattcctcgggaaattggcattgcgattccacatggatgggcgacagagtcatcaccaccagcacccgaacctgggccctgcccacctacaacaaccacctctacaaacaaatttccagccaatcaggagcctcgaacgacaatcactactttggctacagcaccccttgggggtattttgacttcaacagattccactgccacttttcaccacgtgactggcaaagactcatcaacaacaactggggattccgacccaagagactcagcttcaagctctttaacattcaagtcaaagaggtcacgcagaatgacggtacgacgacgattgccaataaccttaccagcacggttcaggtgtttactgactcggagtaccagctcccgtacgtcctcggctcggcgcatcaaggatgcctcccgccgttcccagcagacgtcttcatggtgccacagtatggatacctcaccctgaacaacgggagtcaggcagtaggacgctcttcattttactgcctggagtactttccttctcagatgctgcgtaccggaaacaactttaccttcagctacacttttgaggacgttcctttccacagcagctacgctcacagccagagtctggaccgtctcatgaatcctctcatcgaccagtacctgtattacttgagcagaacaaacactccaagtggaaccaccacgatgtcaaggcttcagttttctcaggccggagcgagtgacattcgggaccagtctaggaactggcttcctggaccctgttaccgccagcagcgagtatcaaagacagctgcggataacaacaacagtgattactcgtggactggagctaccaagtaccacctcaatggcagagactctctggtgaatccgggcccggccatggcaagccacaaggacgatgaagaaaagtattttcctcagagcggggttctcatctttgggaagcaagactcaggaaaaacaaatgtggacattgaaaaggtcatgattacagacgaagaggaaatcaggacaaccaatcccgtggctacggagcagtatggttctgtatctaccaacctccagagcggcaacacacaagcagctacctcagatgtcaacacacaaggcgttcttccaggcatggtctggcaggacagagatgtgtaccttcaggggcccatctgggcaaagattccacacacggacggacattttcacccctctcccctcatgggtggattcggacttaaacaccctcctccacagattctcatcaagaacaccccggtacctgcgaatccttcgaccaccttcagtgcggcaaagtttgcttccttcatcacacagtactccacgggacaggtcagcgtggagatcgagtgggagctgcagaaggaaaacagcaaacgctggaatcccgaaattcagtacacttccaactacaacaagtctgttaatgtggactttactgtggacactaatggcgtgtattcagagcctcgccccattggcaccagatacctgactcgtaatctgtaa

SEQ ID NO: 1799 - DNA, 2208 bp, Artificial Sequence
  Description of Artificial Sequence: Synthetic polynucleotide
atggctgccgatggttatcttccagattggctcgaggacactctctctgaaggaataagacagtggtggaagctcaaacctggcccaccaccaccaaagcccgcagagcggcataaggacgacagcaggggtcttgtgcttcctgggtacaagtacctcggacccttcaacggactcgacaagggagagccggtcaacgaggcagacgccgcggccctcgagcacgacaaagcctacgaccggcagctcgacagcggagacaacccgtacctcaagtacaaccacgccgacgcggagtttcaggagcgccttaaagaagatacgtcttttgggggcaacctcggacgagcagtcttccaggcgaaaaagaggattcttgaacctctgggcctggttgaggaacctgttaagacggctccgggaaaaaagaggccggtagagcactctcctgcggagccagactcctcctcgggaaccggaaagtcgggccagcagcctgcaagaaaaagattgaattttggtcagactggagacgcagactcagtacctgacccccagcctctcggacagccaccagcagccccctctggtctgggaactaatacgatggcttcaggcagtggcgcaccaatggcagacaataacgagggcgccgacggagtgggtaattcctcgggaaattggcattgcgattccacatggatgggcgacagagtcatcaccaccagcacccgaacctgggccctgcccacctacaacaaccacctctacaaacaaatttccagccaatcaggagcctcgaacgacaatcactactttggctacagcaccccttgggggtattttgacttcaacagattccactgccacttttcaccacgtgactggcaaagactcatcaacaacaactggggattccgacccaagagactcaacttcaagctctttaacattcaagtcaaagaggtcacgcagaatgacggtacgacgacgattgccaataaccttaccagcacggttcaggtgtttactgactcggagtaccagctcccgtacgtcctcggctcggcgcatcaaggatgcctcccgccgttcccagcagacgtcttcatggtgccacagtatggatacctcaccctgaacaacgggagtcaggcagtaggacgctcttcattttactgcctggagtactttccttctcagatgctgcgtaccggaaacaactttaccttcagctacacttttgaggacgttcctttccacagcagctacgctcacagccagagtctggaccgtctcatgaatcctctcatcgaccagtacctgtattacttgagcagaacaaacactccaagtggaaccaccacgatgtcaaggcttcagttttctcaggccggagcgagtgacattcgggaccagtctaggaactggcttcctggaccctgttaccgccagcagcgagtatcaaagacagctgcggataacaacaacagtgattactcgtggactggagctaccaagtaccacctcaatggcagagactctctggtgaatccgggcccggccatggcaagccacaaggacgatgaagaaaagtattttcctcagagcggggttctcatctttgggaagcaagactcaggaaaaacaaatgtggacattgaaaaggtcatgattacagacgaagaggaaatcaggacaaccaatcccgtggctacggagcagtatggttctgtatctaccaacctccagagcggcaacacacaagcagctacctcagatgtcaacacacaaggcgttcttccaggcatggtctggcaggacagagatgtgtaccttcaggggcccatctgggcaaagattccacacacggacggacattttcacccctctcccctcatgggtggattcggacttaaacaccctcctccacagattctcatcaagaacaccccggtacctgcgaatccttcgaccaccttcagtgcggcaaagtttgcttccttcatcacacagtactccacgggacaggtcagcgtggagatcgagtgggagctgcagaaggaaaacagcaaacgctggaatcccgaaattcagtacacttccaactacaacaagtctgttaatgtggactttactgtggacactaatggcgtgtattcagagcctcgccccattggcaccagatacctgactcgtaatctgtaa

SEQ ID NO: 1800 - protein, 735 aa, Artificial Sequence
  Description of Artificial Sequence: Synthetic polypeptide
MAADGYLPDWLEDTLSEGIRQWWKLKPGPPPPKPAERHKDDSRGLVLPGYKYLGPFNGLDKGEPVNEADAAALEHDKAYDRQLDSGDNPYLKYNHADAEFQERLKEDTSFGGNLGRAVFQAKKRILEPLGLVEEPVKTAPGKKRPVEHSPAEPDSSSGTGKSGQQPARKRLNFGQTGDADSVPDPQPLGQPPAAPSGLGTNTMASGSGAPMADNNEGADGVGNSSGNWHCDSTWMGDRVITTSTRTWALPTYNNHLYKQISSQSGASNDNHYFGYSTPWGYFDFNRFHCHFSPRDWQRLINNNWGFRPKRLNFKLFNIQVKEVTQNDGTTTIANNLTSTVQVFTDSEYQLPYVLGSAHQGCLPPFPADVFMVPQYGYLTLNNGSQAVGRSSFYCLEYFPSQMLRTGNNFTFSYTFEDVPFHSSYAHSQSLDRLMNPLIDQYLYYLSRTNTPSGTTTMSRLQFSQAGASDIRDQSRNWLPGPCYRQQRVSKTAADNNNSDYSWTGATKYHLNGRDSLVNPGPAMASHKDDEEKYFPQSGVLIFGKQDSGKTNVDIEKVMITDEEEIRTTNPVATEQYGSVSTNLQSGNTQAATSDVNTQGVLPGMVWQDRDVYLQGPIWAKIPHTDGHFHPSPLMGGFGLKHPPPQILIKNTPVPANPSTTFSAAKFASFITQYSTGQVSVEIEWELQKENSKRWNPEIQYTSNYNKSVNVDFTVDTNGVYSEPRPIGTRYLTRNL

SEQ ID NO: 1801 - protein, 736 aa, Artificial Sequence
  Description of Artificial Sequence: Synthetic polypeptide
MAADGYLPDWLEDNLSEGIREWWDLKPGAPKPKANQQKQDDGRGLVLPGYKYLGPFNGLDKGEPVNAADAAALEHDKAYDQQLKAGDNPYLRYNHADAEFQERLQEDTSFGGNLGRAVFQAKKRVLEPFGLVEEGAKTAPGKKRPVEQSPQEPDSSSGIGKTGQQPAKKRLNFGQTGDSESVPDPQPLGEPPATPAAVGPTTMASGGGAPMADNNEGADGVGNASGNWHCDSTWLGDRVITTSTRTWALPTYNNHLYKQISSASTGASNDNHYFGYSTPWGYFDFNRFHCHFSPRDWQRLINNNWGFRPKRLNFKLFNIQVKEVTTNDGVTTIANNLTSTVQVFSDSEYQLPYVLGSAHQGCLPPFPADVFMIPQYGYLTLNNGSQAVGRSSFYCLEYFPSQMLRTGNNFTFSYTFEDVPFHSSYAHSQSLDRLMNPLIDQYLYFLNRTQNQSGSAQNKDLLFSRGSPAGMSVQPKNWLPGPCYRQQRVSKTKTDNNNSNFTWTGASKYNLNGRESIINPGTAMASHKDDKDKFFPMSGVMIFGKESAGASNTALDNVMITDEEEIKATNPVATERFGTVAVNLQSSSTDPATGDVHVMGALPGMVWQDRDVYLQGPIWAKIPHTDGHFHPSPLMGGFGLKHPPPQILIKNTPVPANPPAEFSATKFASFITQYSTGQVSVEIEWELQKENSKRWNPEVQYTSNYAKSANVDFTVDNNGLYTEPRPIGTRYLTRPL

SEQ ID NO: 1802 - protein, 747 aa, Artificial Sequence
  Description of Artificial Sequence: Synthetic polypeptide
MAADGYLPDWLEDTLSEGIRQWWKLKPGPPPPKPAERHKDDSRGLVLPGYKYLGPFNGLDKGEPVNEADAAALEHDKAYDRQLDSGDNPYLKYNHADAEFQERLKEDTSFGGNLGRAVFQAKKRVLEPLGLVEEPVKTAPGKKRPVEHSPVEPDSSSGTGKAGQQPARKRLNFGQTGDADSVPDPQPLGQPPAAPSGLGTNTMATGSGAPMADNNEGADGVGNSSGNWHCDSTWMGDRVITTSTRTWALPTYNNHLYKQISSQSGASNDNHYFGYSTPWGYFDFNRFHCHFSPRDWQRLINNNWGFRPKRLNFKLFNIQVKEVTQNDGTTTIANNLTSTVQVFTDSEYQLPYVLGSAHQGCLPPFPADVFMVPQYGYLTLNNGSQAVGRSSFYCLEYFPSQMLRTGNNFTFSYTFEDVPFHSSYAHSQSLDRLMNPLIDQYLYYLSRTNTPSGTTTQSRLQFSQAGASDIRDQSRNWLPGPCYRQQRVSKTSADNNNSEYSWTGATKYHLNGRDSLVNPGPAMASHKDDEEKFFPQSGVLIFGKQGSEKTNVDIEKVMITDEEEIRTTNPVATEQYGSVSTNLQRGNAAAGSTPPPMAARQAATADVNTQGVLPGMVWQDRDVYLQGPIWAKIPHTDGHFHPSPLMGGFGLKHPPPQILIKNTPVPANPSTTFSAAKFASFITQYSTGQVSVEIEWELQKENSKRWNPEIQYTSNYNKSVNVDFTVDTNGVYSEPRPIGTRYLTRNL

SEQ ID NO: 1803 - protein, 747 aa, Artificial Sequence
  Description of Artificial Sequence: Synthetic polypeptide
MAADGYLPDWLEDTLSEGIRQWWKLKPGPPPPKPAERHKDDSRGLVLPGYKYLGPFNGLDKGEPVNEADAAALEHDKAYDRQLDSGDNPYLKYNHADAEFQERLKEDTSFGGNLGRAVFQAKKRVLEPLGLVEEPVKTAPGKKRPVEHSPVEPDSSSGTGKAGQQPARKRLNFGQTGDADSVPDPQPLGQPPAAPSGLGTNTMATGSGAPMADNNEGADGVGNSSGNWHCDSTWMGDRVITTSTRTWALPTYNNHLYKQISSQSGASNDNHYFGYSTPWGYFDFNRFHCHFSPRDWQRLINNNWGFRPKRLNFKLFNIQVKEVTQNDGTTTIANNLTSTVQVFTDSEYQLPYVLGSAHQGCLPPFPADVFMVPQYGYLTLNNGSQAVGRSSFYCLEYFPSQMLRTGNNFTFSYTFEDVPFHSSYAHSQSLDRLMNPLIDQYLYYLSRTNTPSGTTTQSRLQFSQAGASDIRDQSRNWLPGPCYRQQRVSKTSADNNNSEYSWTGATKYHLNGRDSLVNPGPAMASHKDDEEKFFPQSGVLIFGKQGSEKTNVDIEKVMITDEEEIRTTNPVATEQYGSVSTNLQRGNAAAGETRAPLAARQAATADVNTQGVLPGMVWQDRDVYLQGPIWAKIPHTDGHFHPSPLMGGFGLKHPPPQILIKNTPVPANPSTTFSAAKFASFITQYSTGQVSVEIEWELQKENSKRWNPEIQYTSNYNKSVNVDFTVDTNGVYSEPRPIGTRYLTRNL

SEQ ID NO: 1804 - protein, 11 aa, Artificial Sequence
  Description of Artificial Sequence: Synthetic polypeptide
AQTLAVPFKAQ

SEQ ID NO: 1805 - protein, 11 aa, Artificial Sequence
  Description of Artificial Sequence: Synthetic polypeptide
AQSVSKPFLAQ

SEQ ID NO: 1806 - protein, 11 aa, Artificial Sequence
  Description of Artificial Sequence: Synthetic polypeptide
AQFTLTTPKAQ

SEQ ID NO: 1807 - protein, 11 aa, Artificial Sequence
  Description of Artificial Sequence: Synthetic polypeptide
DGTLAVPFKAQ

SEQ ID NO: 1808 - protein, 11 aa, Artificial Sequence
  Description of Artificial Sequence: Synthetic polypeptide
ESTLAVPFKAQ

SEQ ID NO: 1809 - protein, 11 aa, Artificial Sequence
  Description of Artificial Sequence: Synthetic polypeptide
GGTLAVPFKAQ

SEQ ID NO: 1810 - protein, 11 aa, Artificial Sequence
  Description of Artificial Sequence: Synthetic polypeptide
AQTLATPFKAQ

SEQ ID NO: 1811 - protein, 11 aa, Artificial Sequence
  Description of Artificial Sequence: Synthetic polypeptide
ATTLATPFKAQ

SEQ ID NO: 1812 - protein, 11 aa, Artificial Sequence
  Description of Artificial Sequence: Synthetic polypeptide
DGTLATPFKAQ

SEQ ID NO: 1813 - protein, 11 aa, Artificial Sequence
  Description of Artificial Sequence: Synthetic polypeptide
GGTLATPFKAQ

SEQ ID NO: 1814 - protein, 11 aa, Artificial Sequence
  Description of Artificial Sequence: Synthetic polypeptide
SGSLAVPFKAQ

SEQ ID NO: 1815 - protein, 11 aa, Artificial Sequence
  Description of Artificial Sequence: Synthetic polypeptide
AQTLAQPFKAQ

SEQ ID NO: 1816 - protein, 11 aa, Artificial Sequence
  Description of Artificial Sequence: Synthetic polypeptide
AQTLQQPFKAQ

SEQ ID NO: 1817 - protein, 11 aa, Artificial Sequence
  Description of Artificial Sequence: Synthetic polypeptide
AQTLSNPFKAQ

SEQ ID NO: 1818 - protein, 11 aa, Artificial Sequence
  Description of Artificial Sequence: Synthetic polypeptide
AQTLAVPFSNP

SEQ ID NO: 1819 - protein, 11 aa, Artificial Sequence
  Description of Artificial Sequence: Synthetic polypeptide
QGTLAVPFKAQ

SEQ ID NO: 1820 - protein, 11 aa, Artificial Sequence
  Description of Artificial Sequence: Synthetic polypeptide
NQTLAVPFKAQ

SEQ ID NO: 1821 - protein, 11 aa, Artificial Sequence
  Description of Artificial Sequence: Synthetic polypeptide
EGSLAVPFKAQ

SEQ ID NO: 1822 - protein, 11 aa, Artificial Sequence
  Description of Artificial Sequence: Synthetic polypeptide
SGNLAVPFKAQ

SEQ ID NO: 1823 - protein, 11 aa, Artificial Sequence
  Description of Artificial Sequence: Synthetic polypeptide
EGTLAVPFKAQ

SEQ ID NO: 1824 - protein, 11 aa, Artificial Sequence
  Description of Artificial Sequence: Synthetic polypeptide
DSTLAVPFKAQ

SEQ ID NO: 1825 - protein, 11 aa, Artificial Sequence
  Description of Artificial Sequence: Synthetic polypeptide
AVTLAVPFKAQ

SEQ ID NO: 1826 - protein, 11 aa, Artificial Sequence
  Description of Artificial Sequence: Synthetic polypeptide
AQTLSTPFKAQ

SEQ ID NO: 1827 - protein, 11 aa, Artificial Sequence
  Description of Artificial Sequence: Synthetic polypeptide
AQTLPQPFKAQ

SEQ ID NO: 1828 - protein, 11 aa, Artificial Sequence
  Description of Artificial Sequence: Synthetic polypeptide
AQTLSQPFKAQ

SEQ ID NO: 1829 - protein, 11 aa, Artificial Sequence
  Description of Artificial Sequence: Synthetic polypeptide
AQTLQLPFKAQ

SEQ ID NO: 1830 - protein, 11 aa, Artificial Sequence
  Description of Artificial Sequence: Synthetic polypeptide
AQTLTMPFKAQ

SEQ ID NO: 1831 - protein, 11 aa, Artificial Sequence
  Description of Artificial Sequence: Synthetic polypeptide
AQTLTTPFKAQ

SEQ ID NO: 1832 - protein, 11 aa, Artificial Sequence
  Description of Artificial Sequence: Synthetic polypeptide
AQYTLSQGWAQ

SEQ ID NO: 1833 - protein, 11 aa, Artificial Sequence
  Description of Artificial Sequence: Synthetic polypeptide
AQMNATKNVAQ

SEQ ID NO: 1834 - protein, 11 aa, Artificial Sequence
  Description of Artificial Sequence: Synthetic polypeptide
AQVSGGHHSAQ

SEQ ID NO: 1835 - protein, 11 aa, Artificial Sequence
  Description of Artificial Sequence: Synthetic polypeptide
AQTLTAPFKAQ

SEQ ID NO: 1836 - protein, 11 aa, Artificial Sequence
  Description of Artificial Sequence: Synthetic polypeptide
AQTLSKPFKAQ

SEQ ID NO: 1837 - protein, 7 aa, Artificial Sequence
  Description of Artificial Sequence: Synthetic polypeptide
QAVRTSL

SEQ ID NO: 1838 - protein, 7 aa, Artificial Sequence
  Description of Artificial Sequence: Synthetic polypeptide
LAKERLS

SEQ ID NO: 1839 - protein, 7 aa, Artificial Sequence
  Description of Artificial Sequence: Synthetic polypeptide
MNSTKNV

SEQ ID NO: 1840 - protein, 7 aa, Artificial Sequence
  Description of Artificial Sequence: Synthetic polypeptide
VSGGHHS

SEQ ID NO: 1841 - protein, 14 aa, Artificial Sequence
  Description of Artificial Sequence: Synthetic polypeptide
SAQTLAVPFKAQAQ

SEQ ID NO: 1842 - protein, 14 aa, Artificial Sequence
  Description of Artificial Sequence: Synthetic polypeptide
  misc_feature (2)..(4): Xaa can be any naturally occurring amino acid
SXXXLAVPFKAQAQ

SEQ ID NO: 1843 - protein, 14 aa, Artificial Sequence
  Description of Artificial Sequence: Synthetic polypeptide
  misc_feature (4)..(6): Xaa can be any naturally occurring amino acid
SAQXXXVPFKAQAQ

SEQ ID NO: 1844 - protein, 14 aa, Artificial Sequence
  Description of Artificial Sequence: Synthetic polypeptide
  misc_feature (6)..(8): Xaa can be any naturally occurring amino acid
SAQTLXXXFKAQAQ

SEQ ID NO: 1845 - protein, 14 aa, Artificial Sequence
  Description of Artificial Sequence: Synthetic polypeptide
  misc_feature (8)..(10): Xaa can be any naturally occurring amino acid
SAQTLAVXXXAQAQ

SEQ ID NO: 1846 - protein, 14 aa, Artificial Sequence
  Description of Artificial Sequence: Synthetic polypeptide
  misc_feature (10)..(12): Xaa can be any naturally occurring amino acid
SAQTLAVPFXXXAQ

SEQ ID NO: 1847 - protein, 7 aa, Artificial Sequence
  Description of Artificial Sequence: Synthetic polypeptide
TNHQSAQ

SEQ ID NO: 1848 - protein, 7 aa, Artificial Sequence
  Description of Artificial Sequence: Synthetic polypeptide
AQAQTGW

SEQ ID NO: 1849 - protein, 9 aa, Artificial Sequence
  Description of Artificial Sequence: Synthetic polypeptide
DGTLATPFK

SEQ ID NO: 1850 - protein, 11 aa, Artificial Sequence
  Description of Artificial Sequence: Synthetic polypeptide
  misc_feature (10)..(11): Xaa can be any naturally occurring amino acid
DGTLATPFKXX

SEQ ID NO: 1851 - protein, 8 aa, Artificial Sequence
  Description of Artificial Sequence: Synthetic polypeptide
LAVPFKAQ

SEQ ID NO: 1852 - protein, 6 aa, Artificial Sequence
  Description of Artificial Sequence: Synthetic polypeptide
VPFKAQ

SEQ ID NO: 1853 - protein, 4 aa, Artificial Sequence
  Description of Artificial Sequence: Synthetic polypeptide
FKAQ

SEQ ID NO: 1854 - protein, 6 aa, Artificial Sequence
  Description of Artificial Sequence: Synthetic polypeptide
AQTLAV

SEQ ID NO: 1855 - protein, 8 aa, Artificial Sequence
  Description of Artificial Sequence: Synthetic polypeptide
AQTLAVPF

SEQ ID NO: 1856 - protein, 4 aa, Artificial Sequence
  Description of Artificial Sequence: Synthetic polypeptide
QAVR

SEQ ID NO: 1857 - protein, 4 aa, Artificial Sequence
  Description of Artificial Sequence: Synthetic polypeptide
AVRT

SEQ ID NO: 1858 - protein, 4 aa, Artificial Sequence
  Description of Artificial Sequence: Synthetic polypeptide
VRTS

SEQ ID NO: 1859 - protein, 4 aa, Artificial Sequence
  Description of Artificial Sequence: Synthetic polypeptide
RTSL

SEQ ID NO: 1860 - protein, 5 aa, Artificial Sequence
  Description of Artificial Sequence: Synthetic polypeptide
QAVRT

SEQ ID NO: 1861 - protein, 5 aa, Artificial Sequence
  Description of Artificial Sequence: Synthetic polypeptide
AVRTS

SEQ ID NO: 1862 - protein, 5 aa, Artificial Sequence
  Description of Artificial Sequence: Synthetic polypeptide
VRTSL

SEQ ID NO: 1863 - protein, 6 aa, Artificial Sequence
  Description of Artificial Sequence: Synthetic polypeptide
QAVRTS

SEQ ID NO: 1864 - protein, 6 aa, Artificial Sequence
  Description of Artificial Sequence: Synthetic polypeptide
AVRTSL

SEQ ID NO: 1865 - DNA, 33 bp, Artificial Sequence
  Description of Artificial Sequence: Synthetic polynucleotide
gatgggactttggcggtgccttttaaggcacag

SEQ ID NO: 1866 - DNA, 33 bp, Artificial Sequence
  Description of Artificial Sequence: Synthetic polynucleotide
gatgggacgttggcggtgccttttaaggcacag

SEQ ID NO: 1867 - DNA, 21 bp, Artificial Sequence
  Description of Artificial Sequence: Synthetic polynucleotide
caggcggttaggacgtctttg

SEQ ID NO: 1868 - DNA, 27 bp, Artificial Sequence
  Description of Artificial Sequence: Synthetic polynucleotide
caggtcttcacggactcagactatcag

SEQ ID NO: 1869 - DNA, 32 bp, Artificial Sequence
  Description of Artificial Sequence: Synthetic polynucleotide
caagtaaaacctctacaaatgtggtaaaatcg

SEQ ID NO: 1870 - DNA, 36 bp, Artificial Sequence
  Description of Artificial Sequence: Synthetic polynucleotide
actcatcgaccaatacttgtactatctctctagaac

SEQ ID NO: 1871 - DNA, 26 bp, Artificial Sequence
  Description of Artificial Sequence: Synthetic polynucleotide
ggaagtattccttggttttgaaccca

SEQ ID NO: 1872 - DNA, 23 bp, Artificial Sequence
  Description of Artificial Sequence: Synthetic polynucleotide
ggtcgcggttcttgtttgtggat

SEQ ID NO: 1873 - DNA, 24 bp, Artificial Sequence
  Description of Artificial Sequence: Synthetic polynucleotide
cgaccttgaagcgcatgaactcct

SEQ ID NO: 1874 - DNA, 83 bp, Artificial Sequence
  Description of Artificial Sequence: Synthetic polynucleotide
  misc_feature (42)..(43): n is a, c, g, or t
  misc_feature (45)..(46): n is a, c, g, or t
  misc_feature (48)..(49): n is a, c, g, or t
  misc_feature (51)..(52): n is a, c, g, or t
  misc_feature (54)..(55): n is a, c, g, or t
  misc_feature (57)..(58): n is a, c, g, or t
  misc_feature (60)..(61): n is a, c, g, or t
gtattccttggttttgaacccaaccggtctgcgcctgtgcmnnmnnmnnmnnmnnmnnmnnttgggcactctggtggtttgtc

SEQ ID NO: 1875 - DNA, 64 bp, Artificial Sequence
  Description of Artificial Sequence: Synthetic polynucleotide
  misc_feature (36)..(37): n is a, c, g, or t
  misc_feature (39)..(40): n is a, c, g, or t
  misc_feature (42)..(43): n is a, c, g, or t
gtattccttggttttgaacccaaccggtctgcgcmnnmnnmnnaaaaggcaccgccaaagtttg

SEQ ID NO: 1876 - DNA, 70 bp, Artificial Sequence
  Description of Artificial Sequence: Synthetic polynucleotide
  misc_feature (42)..(43): n is a, c, g, or t
  misc_feature (45)..(46): n is a, c, g, or t
  misc_feature (48)..(49): n is a, c, g, or t
gtattccttggttttgaacccaaccggtctgcgcctgtgcmnnmnnmnncaccgccaaagtttgggcact

SEQ ID NO: 1877 - DNA, 77 bp, Artificial Sequence
  Description of Artificial Sequence: Synthetic polynucleotide
  misc_feature (48)..(49): n is a, c, g, or t
  misc_feature (51)..(52): n is a, c, g, or t
  misc_feature (54)..(55): n is a, c, g, or t
gtattccttggttttgaacccaaccggtctgcgcctgtgccttaaamnnmnnmnncaaagtttgggcactctggtgg

SEQ ID NO: 1878 - DNA, 83 bp, Artificial Sequence
  Description of Artificial Sequence: Synthetic polynucleotide
  misc_feature (54)..(55): n is a, c, g, or t
  misc_feature (57)..(58): n is a, c, g, or t
  misc_feature (60)..(61): n is a, c, g, or t
gtattccttggttttgaacccaaccggtctgcgcctgtgccttaaaaggcacmnnmnnmnnttgggcactctggtggtttgtg

SEQ ID NO: 1879 - DNA, 21 bp, Artificial Sequence
  Description of Artificial Sequence: Synthetic polynucleotide
cttgcgaaggagcggctttcg

SEQ ID NO: 1880 - protein, 10 aa, Artificial Sequence
  Description of Artificial Sequence: Synthetic polypeptide
VNLTWSRASG

SEQ ID NO: 1881 - protein, 14 aa, Artificial Sequence
  Description of Artificial Sequence: Synthetic polypeptide
EFCINHRGYWVCGD

SEQ ID NO: 1882 - protein, 11 aa, Artificial Sequence
  Description of Artificial Sequence: Synthetic polypeptide
EDGQVMDVDLS

SEQ ID NO: 1883 - protein, 9 aa, Artificial Sequence
  Description of Artificial Sequence: Synthetic polypeptide
EKQRNGTLT

SEQ ID NO: 1884 - protein, 17 aa, Artificial Sequence
  Description of Artificial Sequence: Synthetic polypeptide
TYQCRVTHPHLPRALMR

SEQ ID NO: 1885 - protein, 14 aa, Artificial Sequence
  Description of Artificial Sequence: Synthetic polypeptide
RHSTTQPRKTKGSG

SEQ ID NO: 1886 - protein, 13 aa, Artificial Sequence
  Description of Artificial Sequence: Synthetic polypeptide
DSNPRGVSAYLSR

SEQ ID NO: 1887 - protein, 12 aa, Artificial Sequence
  Description of Artificial Sequence: Synthetic polypeptide
TITCLWDLAPSK

SEQ ID NO: 1888 - protein, 10 aa, Artificial Sequence
  Description of Artificial Sequence: Synthetic polypeptide
KTKGSGFFVF

SEQ ID NO: 1889 - protein, 12 aa, Artificial Sequence
  Description of Artificial Sequence: Synthetic polypeptide
THPHLPRALMRS

SEQ ID NO: 1890 - protein, 23 aa, Artificial Sequence
  Description of Artificial Sequence: Synthetic polypeptide
GETYQCRVTHPHLPRALMRSTTK

SEQ ID NO: 1891 - protein, 8 aa, Artificial Sequence
  Description of Artificial Sequence: Synthetic polypeptide
LPRALMRS

SEQ ID NO: 1892 - protein, 8 aa, Artificial Sequence
  Description of Artificial Sequence: Synthetic polypeptide
INHRGYWV

SEQ ID NO: 1893 - protein, 12 aa, Artificial Sequence
  Description of Artificial Sequence: Synthetic polypeptide
CDAGSVRTNAPD

SEQ ID NO: 1894 - protein, 17 aa, Artificial Sequence
  Description of Artificial Sequence: Synthetic polypeptide
AKAVSNLTESRSESLQS

SEQ ID NO: 1895 - protein, 13 aa, Artificial Sequence
  Description of Artificial Sequence: Synthetic polypeptide
SLTGDEFKKVLET

SEQ ID NO: 1896 - protein, 11 aa, Artificial Sequence
  Description of Artificial Sequence: Synthetic polypeptide
REAVAYRFEED

SEQ ID NO: 1897 - protein, 10 aa, Artificial Sequence
  Description of Artificial Sequence: Synthetic polypeptide
INPEIITLDG

SEQ ID NO: 1898 - protein, 15 aa, Artificial Sequence
  Description of Artificial Sequence: Synthetic polypeptide
DISVTGAPVITATYL

SEQ ID NO: 1899 - protein, 12 aa, Artificial Sequence
  Description of Artificial Sequence: Synthetic polypeptide
DISVTGAPVITA

SEQ ID NO: 1900 - protein, 17 aa, Artificial Sequence
  Description of Artificial Sequence: Synthetic polypeptide
PKTVSNLTESSSESVQS

SEQ ID NO: 1901 - protein, 13 aa, Artificial Sequence
  Description of Artificial Sequence: Synthetic polypeptide
SLMGDEFKAVLET

SEQ ID NO: 1902 - protein, 11 aa, Artificial Sequence
  Description of Artificial Sequence: Synthetic polypeptide
QHSVAYTFEED

SEQ ID NO: 1903 - protein, 10 aa, Artificial Sequence
  Description of Artificial Sequence: Synthetic polypeptide
INPEIITRDG

SEQ ID NO: 1904 - protein, 15 aa, Artificial Sequence
  Description of Artificial Sequence: Synthetic polypeptide
DISLTGDPVITASYL

SEQ ID NO: 1905 - protein, 12 aa, Artificial Sequence
  Description of Artificial Sequence: Synthetic polypeptide
DISLTGDPVITA

SEQ ID NO: 1906 - protein, 11 aa, Artificial Sequence
  Description of Artificial Sequence: Synthetic polypeptide
DQSIDFEIDSA

SEQ ID NO: 1907 - protein, 20 aa, Artificial Sequence
  Description of Artificial Sequence: Synthetic polypeptide
KNVSEDLPLPTFSPTLLGDS

SEQ ID NO: 1908 - protein, 11 aa, Artificial Sequence
  Description of Artificial Sequence: Synthetic polypeptide
KNVSEDLPLPT

SEQ ID NO: 1909 - protein, 12 aa, Artificial Sequence
  Description of Artificial Sequence: Synthetic polypeptide
CDSGRVRTDAPD

SEQ ID NO: 1910 - protein, 14 aa, Artificial Sequence
  Description of Artificial Sequence: Synthetic polypeptide
FPEHLLVDFLQSLS

SEQ ID NO: 1911 - protein, 9 aa, Artificial Sequence
  Description of Artificial Sequence: Synthetic polypeptide
DAEFRHDSG

SEQ ID NO: 1912 - protein, 16 aa, Artificial Sequence
  Description of Artificial Sequence: Synthetic polypeptide
HYAAAQWDFGNTMCQL

SEQ ID NO: 1913 - protein, 13 aa, Artificial Sequence
  Description of Artificial Sequence: Synthetic polypeptide
YAAQWDFGNTMCQ

SEQ ID NO: 1914 - protein, 10 aa, Artificial Sequence
  Description of Artificial Sequence: Synthetic polypeptide
RSQKEGLHYT

SEQ ID NO: 1915 - protein, 19 aa, Artificial Sequence
  Description of Artificial Sequence: Synthetic polypeptide
SSRTPSDKPVAHWANPQAE

SEQ ID NO: 1916 - protein, 15 aa, Artificial Sequence
  Description of Artificial Sequence: Synthetic polypeptide
SRTPSDKPVAHWANP

SEQ ID NO: 1917 - protein, 9 aa, Artificial Sequence
  Description of Artificial Sequence: Synthetic polypeptide
SSRTPSDKP

SEQ ID NO: 1918 - protein, 14 aa, Artificial Sequence
  Description of Artificial Sequence: Synthetic polypeptide
NADGNVDYHMNSVP

SEQ ID NO: 1919 - protein, 11 aa, Artificial Sequence
  Description of Artificial Sequence: Synthetic polypeptide
DGNVDYHMNSV

SEQ ID NO: 1920 - protein, 16 aa, Artificial Sequence
  Description of Artificial Sequence: Synthetic polypeptide
RSFKEFLQSSLRALRQ

SEQ ID NO: 1921 - protein, 11 aa, Artificial Sequence
  Description of Artificial Sequence: Synthetic polypeptide
FKEFLQSSLRA

SEQ ID NO: 1922 - protein, 10 aa, Artificial Sequence
  Description of Artificial Sequence: Synthetic polypeptide
QMWAPQWGPD

SEQ ID NO: 1923 - protein, 6 aa, Artificial Sequence
  Description of Artificial Sequence: Synthetic polypeptide
RGNRQA

SEQ ID NO: 1924 - protein, 6 aa, Artificial Sequence
  Description of Artificial Sequence: Synthetic polypeptide
SSSTDP

SEQ ID NO: 1925 - protein, 6 aa, Artificial Sequence
  Description of Artificial Sequence: Synthetic polypeptide
SSNTAP

SEQ ID NO: 1926 - protein, 6 aa, Artificial Sequence
  Description of Artificial Sequence: Synthetic polypeptide
SNSNLP

SEQ ID NO: 1927 - protein, 6 aa, Artificial Sequence
  Description of Artificial Sequence: Synthetic polypeptide
SSTTAP

SEQ ID NO: 1928 - protein, 6 aa, Artificial Sequence
  Description of Artificial Sequence: Synthetic polypeptide
AANTAA

SEQ ID NO: 1929 - protein, 6 aa, Artificial Sequence
  Description of Artificial Sequence: Synthetic polypeptide
QQNTAP

SEQ ID NO: 1930 - protein, 6 aa, Artificial Sequence
  Description of Artificial Sequence: Synthetic polypeptide
SAQAQA

SEQ ID NO: 1931 - protein, 6 aa, Artificial Sequence
  Description of Artificial Sequence: Synthetic polypeptide
QANTGP

SEQ ID NO: 1932 - protein, 6 aa, Artificial Sequence
  Description of Artificial Sequence: Synthetic polypeptide
NATTAP

SEQ ID NO: 1933 - protein, 6 aa, Artificial Sequence
  Description of Artificial Sequence: Synthetic polypeptide
SSTAGP

SEQ ID NO: 1934 - protein, 6 aa, Artificial Sequence
  Description of Artificial Sequence: Synthetic polypeptide
QQNTAA

SEQ ID NO: 1935 - protein, 6 aa, Artificial Sequence
  Description of Artificial Sequence: Synthetic polypeptide
PSTAGP

SEQ ID NO: 1936 - protein, 6 aa, Artificial Sequence
  Description of Artificial Sequence: Synthetic polypeptide
NQNTAP

SEQ ID NO: 1937 - protein, 6 aa, Artificial Sequence
  Description of Artificial Sequence: Synthetic polypeptide
QAANAP

SEQ ID NO: 1938 - protein, 6 aa, Artificial Sequence
  Description of Artificial Sequence: Synthetic polypeptide
SIVGLP

SEQ ID NO: 1939 - protein, 6 aa, Artificial Sequence
  Description of Artificial Sequence: Synthetic polypeptide
AASTAA

SEQ ID NO: 1940 - protein, 6 aa, Artificial Sequence
  Description of Artificial Sequence: Synthetic polypeptide
SQNTTA

SEQ ID NO: 1941 - protein, 6 aa, Artificial Sequence
  Description of Artificial Sequence: Synthetic polypeptide
QQDTAP

SEQ ID NO: 1942 - protein, 6 aa, Artificial Sequence
  Description of Artificial Sequence: Synthetic polypeptide
QTNTGP

SEQ ID NO: 1943 - protein, 6 aa, Artificial Sequence
  Description of Artificial Sequence: Synthetic polypeptide
QTNGAP

SEQ ID NO: 1944 - protein, 6 aa, Artificial Sequence
  Description of Artificial Sequence: Synthetic polypeptide
QQNAAP

SEQ ID NO: 1945 - protein, 6 aa, Artificial Sequence
  Description of Artificial Sequence: Synthetic polypeptide
AANTQA

SEQ ID NO: 1946 - protein, 6 aa, Artificial Sequence
  Description of Artificial Sequence: Synthetic polypeptide
NGRAHA

SEQ ID NO: 1947 - protein, 7 aa, Artificial Sequence
  Description of Artificial Sequence: Synthetic polypeptide
QPEHSST

SEQ ID NO: 1948 - protein, 7 aa, Artificial Sequence
  Description of Artificial Sequence: Synthetic polypeptide
VNTANST

SEQ ID NO: 1949 - protein, 7 aa, Artificial Sequence
  Description of Artificial Sequence: Synthetic polypeptide
HGPMQKS

SEQ ID NO: 1950 - protein, 7 aa, Artificial Sequence
  Description of Artificial Sequence: Synthetic polypeptide
PHKPPLA

SEQ ID NO: 1951 - protein, 7 aa, Artificial Sequence
  Description of Artificial Sequence: Synthetic polypeptide
IKNNEMW

SEQ ID NO: 1952 - protein, 7 aa, Artificial Sequence
  Description of Artificial Sequence: Synthetic polypeptide
RNLDTPM

SEQ ID NO: 1953 - protein, 7 aa, Artificial Sequence
  Description of Artificial Sequence: Synthetic polypeptide
VDSHRQS

SEQ ID NO: 1954 - protein, 7 aa, Artificial Sequence
  Description of Artificial Sequence: Synthetic polypeptide
YDSKTKT

SEQ ID NO: 1955 - protein, 7 aa, Artificial Sequence
  Description of Artificial Sequence: Synthetic polypeptide
SQLPHQK

SEQ ID NO: 1956 - protein, 7 aa, Artificial Sequence
  Description of Artificial Sequence: Synthetic polypeptide
STMQQNT

SEQ ID NO: 1957 - protein, 7 aa, Artificial Sequence
  Description of Artificial Sequence: Synthetic polypeptide
TERYMTQ

SEQ ID NO: 1958 - protein, 7 aa, Artificial Sequence
  Description of Artificial Sequence: Synthetic polypeptide
DASLSTS

SEQ ID NO: 1959 - protein, 7 aa, Artificial Sequence
  Description of Artificial Sequence: Synthetic polypeptide
DLPNKKT

SEQ ID NO: 1960 - protein, 7 aa, Artificial Sequence
  Description of Artificial Sequence: Synthetic polypeptide
DLTAARL

SEQ ID NO: 1961 - protein, 7 aa, Artificial Sequence
  Description of Artificial Sequence: Synthetic polypeptide
EPHQFNY

SEQ ID NO: 1962 - protein, 7 aa, Artificial Sequence
  Description of Artificial Sequence: Synthetic polypeptide
EPQSNHT

SEQ ID NO: 1963 - protein, 7 aa, Artificial Sequence
  Description of Artificial Sequence: Synthetic polypeptide
MSSWPSQ

SEQ ID NO: 1964 - protein, 7 aa, Artificial Sequence
  Description of Artificial Sequence: Synthetic polypeptide
NPKHNAT

SEQ ID NO: 1965 - protein, 7 aa, Artificial Sequence
  Description of Artificial Sequence: Synthetic polypeptide
PDGMRTT

SEQ ID NO: 1966 - protein, 7 aa, Artificial Sequence
  Description of Artificial Sequence: Synthetic polypeptide
PNNNKTT

SEQ ID NO: 1967 - protein, 7 aa, Artificial Sequence
  Description of Artificial Sequence: Synthetic polypeptide
QSTTHDS

SEQ ID NO: 1968 - protein, 7 aa, Artificial Sequence
  Description of Artificial Sequence: Synthetic polypeptide
TGSKQKQ

SEQ ID NO: 1969 - protein, 7 aa, Artificial Sequence
  Description of Artificial Sequence: Synthetic polypeptide
SLKHQAL

SEQ ID NO: 1970 - protein, 7 aa, Artificial Sequence
  Description of Artificial Sequence: Synthetic polypeptide
SPIDGEQ

SEQ ID NO: 1971 - protein, 8 aa, Artificial Sequence
  Description of Artificial Sequence: Synthetic polypeptide
WIFPWIQL

SEQ ID NO: 1972 - protein, 9 aa, Artificial Sequence
  Description of Artificial Sequence: Synthetic polypeptide
CDCRGDCFC

SEQ ID NO: 1973 - protein, 5 aa, Artificial Sequence
  Description of Artificial Sequence: Synthetic polypeptide
CNGRC

SEQ ID NO: 1974 - protein, 7 aa, Artificial Sequence
  Description of Artificial Sequence: Synthetic polypeptide
CPRECES

SEQ ID NO: 1975 - protein, 10 aa, Artificial Sequence
  Description of Artificial Sequence: Synthetic polypeptide
CTTHWGFTLC

SEQ ID NO: 1976 - protein, 9 aa, Artificial Sequence
  Description of Artificial Sequence: Synthetic polypeptide
CGRRAGGSC

SEQ ID NO: 1977 - protein, 9 aa, Artificial Sequence
  Description of Artificial Sequence: Synthetic polypeptide
CKGGRAKDC

SEQ ID NO: 1978 - protein, 9 aa, Artificial Sequence
  Description of Artificial Sequence: Synthetic polypeptide
CVPELGHEC

SEQ ID NO: 1979 - protein, 9 aa, Artificial Sequence
  Description of Artificial Sequence: Synthetic polypeptide
CRRETAWAK

SEQ ID NO: 1980 - protein, 14 aa, Artificial Sequence
  Description of Artificial Sequence: Synthetic polypeptide
VSWFSHRYSPFAVS

SEQ ID NO: 1981 - protein, 13 aa, Artificial Sequence
  Description of Artificial Sequence: Synthetic polypeptide
GYRDGYAGPILYN

SEQ ID NO: 1982 - protein, 7 aa, Artificial Sequence
  Description of Artificial Sequence: Synthetic polypeptide
  misc_feature (1)..(3): Xaa can be any naturally occurring amino acid
  misc_feature (5)..(7): Xaa can be any naturally occurring amino acid
XXXYXXX

SEQ ID NO: 1983 - protein, 4 aa, Artificial Sequence
  Description of Artificial Sequence: Synthetic polypeptide
  misc_feature (2)..(2): Xaa is Glu or Met
YXNW

SEQ ID NO: 1984 - protein, 7 aa, Artificial Sequence
  Description of Artificial Sequence: Synthetic polypeptide
RPLPPLP

SEQ ID NO: 1985 - protein, 7 aa, Artificial Sequence
  Description of Artificial Sequence: Synthetic polypeptide
APPLPPR

SEQ ID NO: 1986 - protein, 12 aa, Artificial Sequence
  Description of Artificial Sequence: Synthetic polypeptide
DVFYPYPYASGS

SEQ ID NO: 1987 - protein, 6 aa, Artificial Sequence
  Description of Artificial Sequence: Synthetic polypeptide
MYWYPY

SEQ ID NO: 1988 - protein, 12 aa, Artificial Sequence
  Description of Artificial Sequence: Synthetic polypeptide
DITWDQLWDLMK

SEQ ID NO: 1989 - protein, 8 aa, Artificial Sequence
  Description of Artificial Sequence: Synthetic polypeptide
  misc_feature (5)..(5): Xaa is Gly or Leu
CWDDXWLC

SEQ ID NO: 1990 - protein, 14 aa, Artificial Sequence
  Description of Artificial Sequence: Synthetic polypeptide
EWCEYLGGYLRCYA

SEQ ID NO: 1991 - protein, 14 aa, Artificial Sequence
  Description of Artificial Sequence: Synthetic polypeptide
  misc_feature (2)..(2): Xaa can be any naturally occurring amino acid
  misc_feature (4)..(5): Xaa can be any naturally occurring amino acid
  misc_feature (8)..(8): Xaa can be any naturally occurring amino acid
  misc_feature (11)..(11): Xaa can be any naturally occurring amino acid
  misc_feature (13)..(13): Xaa can be any naturally occurring amino acid
YXCXXGPXTWXCXP

SEQ ID NO: 1992 - protein, 14 aa, Artificial Sequence
  Description of Artificial Sequence: Synthetic polypeptide
IEGPTLRQWLAARA

SEQ ID NO: 1993 - protein, 5 aa, Artificial Sequence
  Description of Artificial Sequence: Synthetic polypeptide
  misc_feature (3)..(4): Xaa can be any naturally occurring amino acid
  misc_feature (5)..(5): Xaa is Tyr, Trp, Phe, or His
LWXXX

SEQ ID NO: 1994 - protein, 7 aa, Artificial Sequence
  Description of Artificial Sequence: Synthetic polypeptide
  misc_feature (1)..(1): Xaa can be any naturally occurring amino acid
  misc_feature (3)..(4): Xaa can be any naturally occurring amino acid
XFXXYLW

SEQ ID NO: 1995 - protein, 13 aa, Artificial Sequence
  Description of Artificial Sequence: Synthetic polypeptide
SSIISHFRWGLCD

SEQ ID NO: 1996 - protein, 13 aa, Artificial Sequence
  Description of Artificial Sequence: Synthetic polypeptide
MSRPACPPNDKYE

SEQ ID NO: 1997 - protein, 8 aa, Artificial Sequence
  Description of Artificial Sequence: Synthetic polypeptide
CLRSGRGC

SEQ ID NO: 1998 - protein, 9 aa, Artificial Sequence
  Description of Artificial Sequence: Synthetic polypeptide
CHWMFSPWC

SEQ ID NO: 1999 - protein, 4 aa, Artificial Sequence
  Description of Artificial Sequence: Synthetic polypeptide
  misc_feature (2)..(3): Xaa can be any naturally occurring amino acid
WXXF

SEQ ID NO: 2000 - protein, 8 aa, Artificial Sequence
  Description of Artificial Sequence: Synthetic polypeptide
CSSRLDAC

SEQ ID NO: 2001 - protein, 7 aa, Artificial Sequence
  Description of Artificial Sequence: Synthetic polypeptide
CLPVASC

SEQ ID NO: 2002 - protein, 13 aa, Artificial Sequence
  Description of Artificial Sequence: Synthetic polypeptide
CGFECVRQCPERC

SEQ ID NO: 2003 - protein, 13 aa, Artificial Sequence
  Description of Artificial Sequence: Synthetic polypeptide
CVALCREACGEGC

SEQ ID NO: 2004 - protein, 9 aa, Artificial Sequence
  Description of Artificial Sequence: Synthetic polypeptide
SWCEPGWCR

SEQ ID NO: 2005 - protein, 7 aa, Artificial Sequence
  Description of Artificial Sequence: Synthetic polypeptide
YSGKWGW

SEQ ID NO: 2006 - protein, 7 aa, Artificial Sequence
  Description of Artificial Sequence: Synthetic polypeptide
GLSGGRS

SEQ ID NO: 2007 - protein, 7 aa, Artificial Sequence
  Description of Artificial Sequence: Synthetic polypeptide
LMLPRAD

SEQ ID NO: 2008 - protein, 9 aa, Artificial Sequence
  Description of Artificial Sequence: Synthetic polypeptide
CSCFRDVCC

SEQ ID NO: 2009 - protein, 9 aa, Artificial Sequence
  Description of Artificial Sequence: Synthetic polypeptide
CRDVVSVIC

SEQ ID NO: 2010 - protein, 6 aa, Artificial Sequence
  Description of Artificial Sequence: Synthetic polypeptide
MARSGL

SEQ ID NO: 2011 - protein, 6 aa, Artificial Sequence
  Description of Artificial Sequence: Synthetic polypeptide
MARAKE

SEQ ID NO: 2012 - protein, 6 aa, Artificial Sequence
  Description of Artificial Sequence: Synthetic polypeptide
MSRTMS

SEQ ID NO: 2013 - protein, 6 aa, Artificial Sequence
  Description of Artificial Sequence: Synthetic polypeptide
KCCYSL

SEQ ID NO: 2014 - protein, 14 aa, Artificial Sequence
  Description of Artificial Sequence: Synthetic polypeptide
MYWGDSHWLQYWYE

SEQ ID NO: 2015 - protein, 7 aa, Artificial Sequence
  Description of Artificial Sequence: Synthetic polypeptide
MQLPLAT

SEQ ID NO: 2016 - protein, 4 aa, Artificial Sequence
  Description of Artificial Sequence: Synthetic polypeptide
EWLS

SEQ ID NO: 2017 - protein, 4 aa, Artificial Sequence
  Description of Artificial Sequence: Synthetic polypeptide
SNEW

SEQ ID NO: 2018 - protein, 4 aa, Artificial Sequence
  Description of Artificial Sequence: Synthetic polypeptide
TNYL

SEQ ID NO: 2019 - protein, 12 aa, Artificial Sequence
  Description of Artificial Sequence: Synthetic polypeptide
WDLAWMFRLPVG

SEQ ID NO: 2020 - protein, 13 aa, Artificial Sequence
  Description of Artificial Sequence: Synthetic polypeptide
CTVALPGGYVRVC

SEQ ID NO: 2021 - protein, 13 aa, Artificial Sequence
  Description of Artificial Sequence: Synthetic polypeptide
CVAYCIEHHCWTC

SEQ ID NO: 2022 - protein, 12 aa, Artificial Sequence
  Description of Artificial Sequence: Synthetic polypeptide
CVFAHNYDYLVC

SEQ ID NO: 2023 - protein, 10 aa, Artificial Sequence
  Description of Artificial Sequence: Synthetic polypeptide
CVFTSNYAFC

SEQ ID NO: 2024 - protein, 7 aa, Artificial Sequence
  Description of Artificial Sequence: Synthetic polypeptide
VHSPNKK

SEQ ID NO: 2025 - protein, 7 aa, Artificial Sequence
  Description of Artificial Sequence: Synthetic polypeptide
CRGDGWC

SEQ ID NO: 2026 - protein, 6 aa, Artificial Sequence
  Description of Artificial Sequence: Synthetic polypeptide
  misc_feature (1)..(1): Xaa can be any naturally occurring amino acid
  misc_feature (6)..(6): Xaa can be any naturally occurring amino acid
XRGCDX

SEQ ID NO: 2027 - protein, 4 aa, Artificial Sequence
  Description of Artificial Sequence: Synthetic polypeptide
  misc_feature (2)..(4): Xaa can be any naturally occurring amino acid
PXXX

SEQ ID NO: 2028 - protein, 11 aa, Artificial Sequence
  Description of Artificial Sequence: Synthetic polypeptide
SGKGPRQITAL

SEQ ID NO: 2029 - protein, 14 aa, Artificial Sequence
  Description of Artificial Sequence: Synthetic polypeptide
  misc_feature (10)..(10): Xaa is Ala or Gln
  misc_feature (11)..(11): Xaa is Asn or Ala
  misc_feature (12)..(14): Xaa can be any naturally occurring amino acid
AAAAAAAAAXXXXX

SEQ ID NO: 2030 - protein, 6 aa, Artificial Sequence
  Description of Artificial Sequence: Synthetic polypeptide
VYMSPF

SEQ ID NO: 2031 - protein, 7 aa, Artificial Sequence
  Description of Artificial Sequence: Synthetic polypeptide
ATWLPPR

SEQ ID NO: 2032 - protein, 12 aa, Artificial Sequence
  Description of Artificial Sequence: Synthetic polypeptide
HTMYYHHYQHHL

SEQ ID NO: 2033 - protein, 19 aa, Artificial Sequence
  Description of Artificial Sequence: Synthetic polypeptide
SEVGCRAGPLQWLCEKYFG

SEQ ID NO: 2034 - protein, 18 aa, Artificial Sequence
  Description of Artificial Sequence: Synthetic polypeptide
CGLLPVGRPDRNVWRWLC

SEQ ID NO: 2035 - protein, 15 aa, Artificial Sequence
  Description of Artificial Sequence: Synthetic polypeptide
CKGQCDRFKGLPWEC

SEQ ID NO: 2036 - protein, 5 aa, Artificial Sequence
  Description of Artificial Sequence: Synthetic polypeptide
SGRSA

SEQ ID NO: 2037 - protein, 4 aa, Artificial Sequence
  Description of Artificial Sequence: Synthetic polypeptide
WGFP

SEQ ID NO: 2038 - protein, 17 aa, Artificial Sequence
  Description of Artificial Sequence: Synthetic polypeptide
AEPMPHSLNFSQYLWYT

SEQ ID NO: 2039 - protein, 6 aa, Artificial Sequence
  Description of Artificial Sequence: Synthetic polypeptide
  misc_feature (4)..(4): Xaa is Trp or Phe
WAYXSP

SEQ ID NO: 2040 - protein, 7 aa, Artificial Sequence
  Description of Artificial Sequence: Synthetic polypeptide
IELLQAR

SEQ ID NO: 2041 - protein, 16 aa, Artificial Sequence
  Description of Artificial Sequence: Synthetic polypeptide
AYTKCSRQWRTCMTTH

SEQ ID NO: 2042 - protein, 15 aa, Artificial Sequence
  Description of Artificial Sequence: Synthetic polypeptide
PQNSKIPGPTFLDPH

SEQ ID NO: 2043 - protein, 15 aa, Artificial Sequence
  Description of Artificial Sequence: Synthetic polypeptide
SMEPALPDWWWKMFK

SEQ ID NO: 2044 - protein, 16 aa, Artificial Sequence
  Description of Artificial Sequence: Synthetic polypeptide
ANTPCGPYTHDCPVKR

SEQ ID NO: 2045 - protein, 12 aa, Artificial Sequence
  Description of Artificial Sequence: Synthetic polypeptide
TACHQHVRMVRP

SEQ ID NO: 2046 - protein, 12 aa, Artificial Sequence
  Description of Artificial Sequence: Synthetic polypeptide
VPWMEPAYQRFL

SEQ ID NO: 2047 - protein, 8 aa, Artificial Sequence
  Description of Artificial Sequence: Synthetic polypeptide
DPRATPGS

SEQ ID NO: 2048 - protein, 12 aa, Artificial Sequence
  Description of Artificial Sequence: Synthetic polypeptide
FRPNRAQDYNTN

SEQ ID NO: 2049 - protein, 9 aa, Artificial Sequence
  Description of Artificial Sequence: Synthetic polypeptide
CTKNSYLMC

SEQ ID NO: 2050 - protein, 11 aa, Artificial Sequence
  Description of Artificial Sequence: Synthetic polypeptide
  misc_feature (2)..(2): Xaa is Gln or Arg
  misc_feature (3)..(3): Xaa is Leu or Arg
  misc_feature (5)..(5): Xaa is Gly or Asn
  misc_feature (6)..(7): Xaa is any amino acid residue
  misc_feature (9)..(9): Xaa iis Ala or Val
CXXTXXXGXGC

SEQ ID NO: 2051 - protein, 9 aa, Artificial Sequence
  Description of Artificial Sequence: Synthetic polypeptide
CPIEDRPMC

SEQ ID NO: 2052 - protein, 12 aa, Artificial Sequence
  Description of Artificial Sequence: Synthetic polypeptide
HEWSYLAPYPWF

SEQ ID NO: 2053 - protein, 9 aa, Artificial Sequence
  Description of Artificial Sequence: Synthetic polypeptide
MCPKHPLGC

SEQ ID NO: 2054 - protein, 15 aa, Artificial Sequence
  Description of Artificial Sequence: Synthetic polypeptide
RMWPSSTVNLSAGRR

SEQ ID NO: 2055 - protein, 20 aa, Artificial Sequence
  Description of Artificial Sequence: Synthetic polypeptide
SAKTAVSQRVWLPSHRGGEP

SEQ ID NO: 2056 - protein, 20 aa, Artificial Sequence
  Description of Artificial Sequence: Synthetic polypeptide
KSREHVNNSACPSKRITAAL

SEQ ID NO: 2057 - protein, 4 aa, Artificial Sequence
  Description of Artificial Sequence: Synthetic polypeptide
EGFR

SEQ ID NO: 2058 - protein, 6 aa, Artificial Sequence
  Description of Artificial Sequence: Synthetic polypeptide
AGLGVR

SEQ ID NO: 2059 - protein, 15 aa, Artificial Sequence
  Description of Artificial Sequence: Synthetic polypeptide
GTRQGHTMRLGVSDG

SEQ ID NO: 2060 - protein, 15 aa, Artificial Sequence
  Description of Artificial Sequence: Synthetic polypeptide
IAGLATPGWSHWLAL

SEQ ID NO: 2061 - protein, 7 aa, Artificial Sequence
  Description of Artificial Sequence: Synthetic polypeptide
SMSIARL

SEQ ID NO: 2062 - protein, 7 aa, Artificial Sequence
  Description of Artificial Sequence: Synthetic polypeptide
HTFEPGV

SEQ ID NO: 2063 - protein, 15 aa, Artificial Sequence
  Description of Artificial Sequence: Synthetic polypeptide
NTSLKRISNKRIRRK

SEQ ID NO: 2064 - protein, 15 aa, Artificial Sequence
  Description of Artificial Sequence: Synthetic polypeptide
LRIKRKRRKRKKTRK

SEQ ID NO: 2065 - DNA, 21 bp, adeno-associated virus 2
  misc_feature (3)..(3): n is a, c, g, or t
  misc_feature (4)..(5): n is a, c or g
  misc_feature (6)..(6): n is a or c
  misc_feature (7)..(7): n is a, g, or t
  misc_feature (13)..(13): n is a or g
  misc_feature (14)..(14): n is g or c
  misc_feature (17)..(17): n is g or c
agnnnnncagganncancaac

SEQ ID NO: 2066 - protein, 7 aa, Artificial Sequence
  Description of Artificial Sequence: Synthetic polypeptide
SDSGASN

SEQ ID NO: 2067 - protein, 7 aa, Artificial Sequence
  Description of Artificial Sequence: Synthetic polypeptide
SPSGASN

SEQ ID NO: 2068 - protein, 7 aa, Artificial Sequence
  Description of Artificial Sequence: Synthetic polypeptide
SHSGASN

SEQ ID NO: 2069 - protein, 7 aa, Artificial Sequence
  Description of Artificial Sequence: Synthetic polypeptide
SRSGASN

SEQ ID NO: 2070 - protein, 7 aa, Artificial Sequence
  Description of Artificial Sequence: Synthetic polypeptide
SKSGASN

SEQ ID NO: 2071 - protein, 7 aa, Artificial Sequence
  Description of Artificial Sequence: Synthetic polypeptide
SNSGASN

SEQ ID NO: 2072 - protein, 7 aa, Artificial Sequence
  Description of Artificial Sequence: Synthetic polypeptide
SGSGASN

SEQ ID NO: 2073 - protein, 7 aa, Artificial Sequence
  Description of Artificial Sequence: Synthetic polypeptide
SASGASN

SEQ ID NO: 2074 - protein, 7 aa, Artificial Sequence
  Description of Artificial Sequence: Synthetic polypeptide
SESGTSN

SEQ ID NO: 2075 - protein, 7 aa, Artificial Sequence
  Description of Artificial Sequence: Synthetic polypeptide
STTGGSN

SEQ ID NO: 2076 - protein, 7 aa, Artificial Sequence
  Description of Artificial Sequence: Synthetic polypeptide
SSAGSTN

SEQ ID NO: 2077 - protein, 6 aa, Artificial Sequence
  Description of Artificial Sequence: Synthetic polypeptide
NNDSQA

SEQ ID NO: 2078 - protein, 6 aa, Artificial Sequence
  Description of Artificial Sequence: Synthetic polypeptide
NNRNQA

SEQ ID NO: 2079 - protein, 6 aa, Artificial Sequence
  Description of Artificial Sequence: Synthetic polypeptide
NNNKQA

SEQ ID NO: 2080 - protein, 6 aa, Artificial Sequence
  Description of Artificial Sequence: Synthetic polypeptide
NAKRQA

SEQ ID NO: 2081 - protein, 6 aa, Artificial Sequence
  Description of Artificial Sequence: Synthetic polypeptide
NDEHQA

SEQ ID NO: 2082 - protein, 6 aa, Artificial Sequence
  Description of Artificial Sequence: Synthetic polypeptide
NTSQKA

SEQ ID NO: 2083 - protein, 25 aa, Artificial Sequence
  Description of Artificial Sequence: Synthetic polypeptide
YYLSRTNTPSGTDTQSRLVFSQAGA

SEQ ID NO: 2084 - protein, 25 aa, Artificial Sequence
  Description of Artificial Sequence: Synthetic polypeptide
YYLSRTNTDSGTETQSGLDFSQAGA

SEQ ID NO: 2085 - protein, 25 aa, Artificial Sequence
  Description of Artificial Sequence: Synthetic polypeptide
YYLSRTNTESGTPTQSALEFSQAGA

SEQ ID NO: 2086 - protein, 25 aa, Artificial Sequence
  Description of Artificial Sequence: Synthetic polypeptide
YYLSRTNTHSGTHTQSPLHFSQAGA

SEQ ID NO: 2087 - protein, 25 aa, Artificial Sequence
  Description of Artificial Sequence: Synthetic polypeptide
YYLSRTNTSSGTITISHLIFSQAGA

SEQ ID NO: 2088 - protein, 25 aa, Artificial Sequence
  Description of Artificial Sequence: Synthetic polypeptide
YYLSRTNTRSGIMTKSSLMFSQAGA

SEQ ID NO: 2089 - protein, 25 aa, Artificial Sequence
  Description of Artificial Sequence: Synthetic polypeptide
YYLSRTNTKSGRKTLSNLSFSQAGA

SEQ ID NO: 2090 - protein, 25 aa, Artificial Sequence
  Description of Artificial Sequence: Synthetic polypeptide
YYLSRTNDGSGPVTPSKLRFSQRGA

SEQ ID NO: 2091 - protein, 25 aa, Artificial Sequence
  Description of Artificial Sequence: Synthetic polypeptide
YYLSRTNAASGHATHSDLKFSQPGA

SEQ ID NO: 2092 - protein, 25 aa, Artificial Sequence
  Description of Artificial Sequence: Synthetic polypeptide
YYLSRTNGQAGSLTMSELGFSQVGA

SEQ ID NO: 2093 - protein, 25 aa, Artificial Sequence
  Description of Artificial Sequence: Synthetic polypeptide
YYLSRTNSTGGNQTTSQLLFSQLSA

SEQ ID NO: 2094 - protein, 25 aa, Artificial Sequence
  Description of Artificial Sequence: Synthetic polypeptide
YFLSRTNNNTGLNTNSTLNFSQGRA

SEQ ID NO: 2095 - protein, 16 aa, Artificial Sequence
  Description of Artificial Sequence: Synthetic polypeptide
SKTGADNNNSEYSWTG

SEQ ID NO: 2096 - protein, 16 aa, Artificial Sequence
  Description of Artificial Sequence: Synthetic polypeptide
SKTDADNNNSEYSWTG

SEQ ID NO: 2097 - protein, 16 aa, Artificial Sequence
  Description of Artificial Sequence: Synthetic polypeptide
SKTEADNNNSEYSWTG

SEQ ID NO: 2098 - protein, 16 aa, Artificial Sequence
  Description of Artificial Sequence: Synthetic polypeptide
SKTPADNNNSEYSWTG

SEQ ID NO: 2099 - protein, 16 aa, Artificial Sequence
  Description of Artificial Sequence: Synthetic polypeptide
SKTHADNNNSEYSWTG

SEQ ID NO: 2100 - protein, 16 aa, Artificial Sequence
  Description of Artificial Sequence: Synthetic polypeptide
SKTQADNNNSEYSWTG

SEQ ID NO: 2101 - protein, 16 aa, Artificial Sequence
  Description of Artificial Sequence: Synthetic polypeptide
SKTIADNNNSEYSWTG

SEQ ID NO: 2102 - protein, 16 aa, Artificial Sequence
  Description of Artificial Sequence: Synthetic polypeptide
SKTMADNNNSEYSWTG

SEQ ID NO: 2103 - protein, 16 aa, Artificial Sequence
  Description of Artificial Sequence: Synthetic polypeptide
SKTRADNNNSEYSWTG

SEQ ID NO: 2104 - protein, 16 aa, Artificial Sequence
  Description of Artificial Sequence: Synthetic polypeptide
SKTNADNNNSEYSWTG

SEQ ID NO: 2105 - protein, 16 aa, Artificial Sequence
  Description of Artificial Sequence: Synthetic polypeptide
SKTVGRNNNSEYSWTG

SEQ ID NO: 2106 - protein, 16 aa, Artificial Sequence
  Description of Artificial Sequence: Synthetic polypeptide
SKTADRNNNSEYSWTG

SEQ ID NO: 2107 - protein, 16 aa, Artificial Sequence
  Description of Artificial Sequence: Synthetic polypeptide
SKKLSQNNNSKYSWQG

SEQ ID NO: 2108 - protein, 16 aa, Artificial Sequence
  Description of Artificial Sequence: Synthetic polypeptide
SKPTTGNNNSDYSWPG

SEQ ID NO: 2109 - protein, 16 aa, Artificial Sequence
  Description of Artificial Sequence: Synthetic polypeptide
STQKNENNNSNYSWPG

SEQ ID NO: 2110 - protein, 8 aa, Artificial Sequence
  Description of Artificial Sequence: Synthetic polypeptide
HKDDEGKF

SEQ ID NO: 2111 - protein, 8 aa, Artificial Sequence
  Description of Artificial Sequence: Synthetic polypeptide
HKDDNRKF

SEQ ID NO: 2112 - protein, 8 aa, Artificial Sequence
  Description of Artificial Sequence: Synthetic polypeptide
HKDDTNKF

SEQ ID NO: 2113 - protein, 8 aa, Artificial Sequence
  Description of Artificial Sequence: Synthetic polypeptide
HEDSDKNF

SEQ ID NO: 2114 - protein, 8 aa, Artificial Sequence
  Description of Artificial Sequence: Synthetic polypeptide
HRDGADSF

SEQ ID NO: 2115 - protein, 8 aa, Artificial Sequence
  Description of Artificial Sequence: Synthetic polypeptide
HGDNKSRF

SEQ ID NO: 2116 - protein, 14 aa, Artificial Sequence
  Description of Artificial Sequence: Synthetic polypeptide
KQGSEKTNVDFEEV

SEQ ID NO: 2117 - protein, 14 aa, Artificial Sequence
  Description of Artificial Sequence: Synthetic polypeptide
KQGSEKTNVDSEEV

SEQ ID NO: 2118 - protein, 14 aa, Artificial Sequence
  Description of Artificial Sequence: Synthetic polypeptide
KQGSEKTNVDVEEV

SEQ ID NO: 2119 - protein, 14 aa, Artificial Sequence
  Description of Artificial Sequence: Synthetic polypeptide
KQGSDKTNVDDAGV

SEQ ID NO: 2120 - protein, 14 aa, Artificial Sequence
  Description of Artificial Sequence: Synthetic polypeptide
KQGSSKTNVDPREV

SEQ ID NO: 2121 - protein, 14 aa, Artificial Sequence
  Description of Artificial Sequence: Synthetic polypeptide
KQGSRKTNVDHKQV

SEQ ID NO: 2122 - protein, 14 aa, Artificial Sequence
  Description of Artificial Sequence: Synthetic polypeptide
KQGSKGGNVDTNRV

SEQ ID NO: 2123 - protein, 14 aa, Artificial Sequence
  Description of Artificial Sequence: Synthetic polypeptide
KQGSGEANVDNGDV

SEQ ID NO: 2124 - protein, 14 aa, Artificial Sequence
  Description of Artificial Sequence: Synthetic polypeptide
KQDAAADNIDYDHV

SEQ ID NO: 2125 - protein, 14 aa, Artificial Sequence
  Description of Artificial Sequence: Synthetic polypeptide
KQSGTRSNAAASSV

SEQ ID NO: 2126 - protein, 14 aa, Artificial Sequence
  Description of Artificial Sequence: Synthetic polypeptide
KENTNTNDTELTNV

SEQ ID NO: 2127 - protein, 14 aa, Artificial Sequence
  Description of Artificial Sequence: Synthetic polypeptide
QRGNNVAATADVNT

SEQ ID NO: 2128 - protein, 14 aa, Artificial Sequence
  Description of Artificial Sequence: Synthetic polypeptide
QRGNNEAATADVNT

SEQ ID NO: 2129 - protein, 14 aa, Artificial Sequence
  Description of Artificial Sequence: Synthetic polypeptide
QRGNNPAATADVNT

SEQ ID NO: 2130 - protein, 14 aa, Artificial Sequence
  Description of Artificial Sequence: Synthetic polypeptide
QRGNNHAATADVNT

SEQ ID NO: 2131 - protein, 14 aa, Artificial Sequence
  Description of Artificial Sequence: Synthetic polypeptide
QEENNIAATPGVNT

SEQ ID NO: 2132 - protein, 14 aa, Artificial Sequence
  Description of Artificial Sequence: Synthetic polypeptide
QPPNNMAATHEVNT

SEQ ID NO: 2133 - protein, 14 aa, Artificial Sequence
  Description of Artificial Sequence: Synthetic polypeptide
QHHNNSAATTIVNT

SEQ ID NO: 2134 - protein, 14 aa, Artificial Sequence
  Description of Artificial Sequence: Synthetic polypeptide
QTTNNRAAFNMVET

SEQ ID NO: 2135 - protein, 14 aa, Artificial Sequence
  Description of Artificial Sequence: Synthetic polypeptide
QKKNNNAASKKVAT

SEQ ID NO: 2136 - protein, 14 aa, Artificial Sequence
  Description of Artificial Sequence: Synthetic polypeptide
QGGNNKAADDAVKT

SEQ ID NO: 2137 - protein, 14 aa, Artificial Sequence
  Description of Artificial Sequence: Synthetic polypeptide
QAAKGGAADDAVKT

SEQ ID NO: 2138 - protein, 14 aa, Artificial Sequence
  Description of Artificial Sequence: Synthetic polypeptide
QDDRAAAANESVDT

SEQ ID NO: 2139 - protein, 14 aa, Artificial Sequence
  Description of Artificial Sequence: Synthetic polypeptide
QQQHDDAAYQRVHT

SEQ ID NO: 2140 - protein, 14 aa, Artificial Sequence
  Description of Artificial Sequence: Synthetic polypeptide
QSSSSLAAVSTVQT

SEQ ID NO: 2141 - protein, 14 aa, Artificial Sequence
  Description of Artificial Sequence: Synthetic polypeptide
QNNQTTAAIRNVTT

SEQ ID NO: 2142 - protein, 12 aa, Artificial Sequence
  Description of Artificial Sequence: Synthetic polypeptide
NYNKKSDNVDFT

SEQ ID NO: 2143 - protein, 12 aa, Artificial Sequence
  Description of Artificial Sequence: Synthetic polypeptide
NYNKKSENVDFT

SEQ ID NO: 2144 - protein, 12 aa, Artificial Sequence
  Description of Artificial Sequence: Synthetic polypeptide
NYNKKSLNVDFT

SEQ ID NO: 2145 - protein, 12 aa, Artificial Sequence
  Description of Artificial Sequence: Synthetic polypeptide
NYNKKSPNVDFT

SEQ ID NO: 2146 - protein, 12 aa, Artificial Sequence
  Description of Artificial Sequence: Synthetic polypeptide
NYSKKSHCVDFT

SEQ ID NO: 2147 - protein, 11 aa, Artificial Sequence
  Description of Artificial Sequence: Synthetic polypeptide
NYRKTIYVDFT

SEQ ID NO: 2148 - protein, 11 aa, Artificial Sequence
  Description of Artificial Sequence: Synthetic polypeptide
NYKEKKDVHFT

SEQ ID NO: 2149 - protein, 11 aa, Artificial Sequence
  Description of Artificial Sequence: Synthetic polypeptide
NYGHRAIVQFT

SEQ ID NO: 2150 - protein, 11 aa, Artificial Sequence
  Description of Artificial Sequence: Synthetic polypeptide
NYANHQFVVCT

SEQ ID NO: 2151 - protein, 12 aa, Artificial Sequence
  Description of Artificial Sequence: Synthetic polypeptide
NYDDDPTGVLLT

SEQ ID NO: 2152 - protein, 11 aa, Artificial Sequence
  Description of Artificial Sequence: Synthetic polypeptide
NYDDPTGVLLT

SEQ ID NO: 2153 - protein, 11 aa, Artificial Sequence
  Description of Artificial Sequence: Synthetic polypeptide
NFEQQNSVEWT

SEQ ID NO: 2154 - protein, 7 aa, Artificial Sequence
  Description of Artificial Sequence: Synthetic polypeptide
SQSGASN

SEQ ID NO: 2155 - protein, 6 aa, Artificial Sequence
  Description of Artificial Sequence: Synthetic polypeptide
NNGSQA

SEQ ID NO: 2156 - protein, 25 aa, Artificial Sequence
  Description of Artificial Sequence: Synthetic polypeptide
YYLSRTNTPSGTTTWSRLQFSQAGA

SEQ ID NO: 2157 - protein, 16 aa, Artificial Sequence
  Description of Artificial Sequence: Synthetic polypeptide
SKTSADNNNSEYSWTG

SEQ ID NO: 2158 - protein, 8 aa, Artificial Sequence
  Description of Artificial Sequence: Synthetic polypeptide
HKDDEEKF

SEQ ID NO: 2159 - protein, 14 aa, Artificial Sequence
  Description of Artificial Sequence: Synthetic polypeptide
KQGSEKTNVDIEEV

SEQ ID NO: 2160 - protein, 14 aa, Artificial Sequence
  Description of Artificial Sequence: Synthetic polypeptide
QRGNNQAATADVNT

SEQ ID NO: 2161 - protein, 12 aa, Artificial Sequence
  Description of Artificial Sequence: Synthetic polypeptide
NYNKKSVNVDFT

SEQ ID NO: 2162 - protein, 42 aa, Artificial Sequence
  Description of Artificial Sequence: Synthetic polypeptide
SQSGASNYNTPSGTTTQSRLQFSTSADNNNSEYSWTGATKYH

SEQ ID NO: 2163 - protein, 42 aa, Artificial Sequence
  Description of Artificial Sequence: Synthetic polypeptide
SASGASNFNSEGGSLTQSSLGFSTDGENNNSDFSWTGATKYH

SEQ ID NO: 2164 - protein, 42 aa, Artificial Sequence
  Description of Artificial Sequence: Synthetic polypeptide
SQSGASNYNTPSGTTTQSRLQFSTDGENNNSDFSWTGATKYH

SEQ ID NO: 2165 - protein, 42 aa, Artificial Sequence
  Description of Artificial Sequence: Synthetic polypeptide
SASGASNYNTPSGTTTQSRLQFSTSADNNNSEFSWPGATTYH

SEQ ID NO: 2166 - protein, 42 aa, Artificial Sequence
  Description of Artificial Sequence: Synthetic polypeptide
SQSGASNFNSEGGSLTQSSLGFSTDGENNNSDFSWTGATKYH

SEQ ID NO: 2167 - protein, 42 aa, Artificial Sequence
  Description of Artificial Sequence: Synthetic polypeptide
SASGASNYNTPSGSLTQSSLGFSTDGENNNSDFSWTGATKYH

SEQ ID NO: 2168 - protein, 42 aa, Artificial Sequence
  Description of Artificial Sequence: Synthetic polypeptide
SQSGASNYNTPSGTTTQSRLQFSTSADNNNSDFSWTGATKYH

SEQ ID NO: 2169 - protein, 42 aa, Artificial Sequence
  Description of Artificial Sequence: Synthetic polypeptide
SGAGASNFNSEGGSLTQSSLGFSTDGENNNSDFSWTGATKYH

SEQ ID NO: 2170 - protein, 7 aa, Artificial Sequence
  Description of Artificial Sequence: Synthetic polypeptide
SGAGASN

SEQ ID NO: 2171 - protein, 15 aa, Artificial Sequence
  Description of Artificial Sequence: Synthetic polypeptide
NSEGGSLTQSSLGFS

SEQ ID NO: 2172 - protein, 11 aa, Artificial Sequence
  Description of Artificial Sequence: Synthetic polypeptide
TDGENNNSDFS

SEQ ID NO: 2173 - protein, 10 aa, Artificial Sequence
  Description of Artificial Sequence: Synthetic polypeptide
SEFSWPGATT

SEQ ID NO: 2174 - protein, 13 aa, Artificial Sequence
  Description of Artificial Sequence: Synthetic polypeptide
TSADNNNSDFSWT

SEQ ID NO: 2175 - protein, 8 aa, Artificial Sequence
  Description of Artificial Sequence: Synthetic polypeptide
SQSGASNY

SEQ ID NO: 2176 - protein, 15 aa, Artificial Sequence
  Description of Artificial Sequence: Synthetic polypeptide
NTPSGTTTQSRLQFS

SEQ ID NO: 2177 - protein, 19 aa, Artificial Sequence
  Description of Artificial Sequence: Synthetic polypeptide
TSADNNNSEYSWTGATKYH

SEQ ID NO: 2178 - protein, 8 aa, Artificial Sequence
  Description of Artificial Sequence: Synthetic polypeptide
SASGASNF

SEQ ID NO: 2179 - protein, 19 aa, Artificial Sequence
  Description of Artificial Sequence: Synthetic polypeptide
TDGENNNSDFSWTGATKYH

SEQ ID NO: 2180 - protein, 8 aa, Artificial Sequence
  Description of Artificial Sequence: Synthetic polypeptide
SASGASNY

SEQ ID NO: 2181 - protein, 19 aa, Artificial Sequence
  Description of Artificial Sequence: Synthetic polypeptide
TSADNNNSEFSWPGATTYH

SEQ ID NO: 2182 - protein, 15 aa, Artificial Sequence
  Description of Artificial Sequence: Synthetic polypeptide
NTPSGSLTQSSLGFS

SEQ ID NO: 2183 - protein, 19 aa, Artificial Sequence
  Description of Artificial Sequence: Synthetic polypeptide
TSADNNNSDFSWTGATKYH

SEQ ID NO: 2184 - protein, 8 aa, Artificial Sequence
  Description of Artificial Sequence: Synthetic polypeptide
SGAGASNF

SEQ ID NO: 2185 - protein, 48 aa, Artificial Sequence
  Description of Artificial Sequence: Synthetic polypeptide
CTCCAGVVSVVSMRSRVCVNSGCAGCTDHCVVSRNSGTCVMSACACAA

SEQ ID NO: 2186 - protein, 48 aa, Artificial Sequence
  Description of Artificial Sequence: Synthetic polypeptide
CTCCAGAGAGGCAACAGACAAGCAGCTACCGCAGATGTCAACACACAA

SEQ ID NO: 2187 - protein, 7 aa, Artificial Sequence
  Description of Artificial Sequence: Synthetic polypeptide
SAAGASN

SEQ ID NO: 2188 - protein, 24 aa, Artificial Sequence
  Description of Artificial Sequence: Synthetic polypeptide
YFLSRTNTESGSTTQSTLRFSQAG

SEQ ID NO: 2189 - protein, 13 aa, Artificial Sequence
  Description of Artificial Sequence: Synthetic polypeptide
SKTSADNNNSDFS

SEQ ID NO: 2190 - protein, 14 aa, Artificial Sequence
  Description of Artificial Sequence: Synthetic polypeptide
KQGSEKTDVDIDKV

SEQ ID NO: 2191 - protein, 7 aa, Artificial Sequence
  Description of Artificial Sequence: Synthetic polypeptide
STAGASN

SEQ ID NO: 2192 - protein, 24 aa, Artificial Sequence
  Description of Artificial Sequence: Synthetic polypeptide
YFLSRTNTTSGIETQSTLRFSQAG

SEQ ID NO: 2193 - protein, 13 aa, Artificial Sequence
  Description of Artificial Sequence: Synthetic polypeptide
SKTDGENNNSDFS

SEQ ID NO: 2194 - protein, 14 aa, Artificial Sequence
  Description of Artificial Sequence: Synthetic polypeptide
KQGAAADDVEIDGV

SEQ ID NO: 2195 - protein, 7 aa, Artificial Sequence
  Description of Artificial Sequence: Synthetic polypeptide
SEAGASN

SEQ ID NO: 2196 - protein, 24 aa, Artificial Sequence
  Description of Artificial Sequence: Synthetic polypeptide
YYLSRTNTPSGTTTQSRLQFSQAG

SEQ ID NO: 2197 - protein, 13 aa, Artificial Sequence
  Description of Artificial Sequence: Synthetic polypeptide
SKTSADNNNSEYS

SEQ ID NO: 2198 - protein, 14 aa, Artificial Sequence
  Description of Artificial Sequence: Synthetic polypeptide
KQGSEKTNVDIEKV

SEQ ID NO: 2199 - protein, 24 aa, Artificial Sequence
  Description of Artificial Sequence: Synthetic polypeptide
YFLSRTNDASGSDTKSTLLFSQAG

SEQ ID NO: 2200 - protein, 13 aa, Artificial Sequence
  Description of Artificial Sequence: Synthetic polypeptide
STTPSENNNSEYS

SEQ ID NO: 2201 - protein, 7 aa, Artificial Sequence
  Description of Artificial Sequence: Synthetic polypeptide
SAAGATN

SEQ ID NO: 2202 - protein, 24 aa, Artificial Sequence
  Description of Artificial Sequence: Synthetic polypeptide
YFLSRTNGEAGSATLSELRFSQAG

SEQ ID NO: 2203 - protein, 8 aa, Artificial Sequence
  Description of Artificial Sequence: Synthetic polypeptide
HGDDADRF

SEQ ID NO: 2204 - protein, 14 aa, Artificial Sequence
  Description of Artificial Sequence: Synthetic polypeptide
KQGAEKSDVEVDRV

SEQ ID NO: 2205 - protein, 14 aa, Artificial Sequence
  Description of Artificial Sequence: Synthetic polypeptide
KQDSGGDNIDIDQV

SEQ ID NO: 2206 - protein, 7 aa, Artificial Sequence
  Description of Artificial Sequence: Synthetic polypeptide
SDAGASN

SEQ ID NO: 2207 - protein, 24 aa, Artificial Sequence
  Description of Artificial Sequence: Synthetic polypeptide
YFLSRTNTEGGHDTQSTLRFSQAG

SEQ ID NO: 2208 - protein, 14 aa, Artificial Sequence
  Description of Artificial Sequence: Synthetic polypeptide
KEDGGGSDVAIDEV

SEQ ID NO: 2209 - protein, 7 aa, Artificial Sequence
  Description of Artificial Sequence: Synthetic polypeptide
SNAGASN

SEQ ID NO: 2210 - protein, 24 aa, Artificial Sequence
  Description of Artificial Sequence: Synthetic polypeptide
YFLSRTNGEAGSATLSELRFSQPG

SEQ ID NO: 2211 - DNA, 21 bp, Artificial Sequence
  Description of Artificial Sequence: Synthetic polynucleotide
  misc_feature (4)..(5): n is a, c, or g
  misc_feature (6)..(6): n is a or c
  misc_feature (7)..(7): n is a, g, or t
  misc_feature (13)..(13): n is a or g
  misc_feature (14)..(14): n is g or c
  misc_feature (17)..(17): n is g or c
agcnnnncagganncancaac

SEQ ID NO: 2212 - DNA, 18 bp, Artificial Sequence
  Description of Artificial Sequence: Synthetic polynucleotide
  misc_feature (4)..(4): n is a or g
  misc_feature (7)..(8): n is a or g
  misc_feature (9)..(9): n is g or c
  misc_feature (10)..(10): n is a or c
  misc_feature (11)..(11): n is a or g
  misc_feature (12)..(12): n is g or c
  misc_feature (13)..(13): n is a or c
aacnacnnnnnnnaggca

SEQ ID NO: 2213 - DNA, 24 bp, Artificial Sequence
  Description of Artificial Sequence: Synthetic polynucleotide
  misc_feature (4)..(5): n is a or g
  misc_feature (10)..(11): n is a or g
  misc_feature (13)..(13): n is a or g
  misc_feature (14)..(14): n is a or c
  misc_feature (15)..(15): n is g or c
  misc_feature (16)..(17): n is a or g
  misc_feature (18)..(18): n is g or c
  misc_feature (20)..(20): n is a or g
  misc_feature (21)..(21): n is g or c
cacnnggacnncnnnnnnannttt

SEQ ID NO: 2214 - DNA, 75 bp, Artificial Sequence
  Description of Artificial Sequence: Synthetic polynucleotide
  misc_feature (22)..(22): n is a or g
  misc_feature (23)..(23): n is a, c, or g
  misc_feature (25)..(26): n is a, c, or g
  misc_feature (27)..(27): n is g or c
  misc_feature (28)..(28): n is a or g
  misc_feature (29)..(29): n is g or c
  misc_feature (34)..(34): n is a or c
  misc_feature (35)..(35): n is a, c, t, or g
  misc_feature (37)..(37): n is a, c, or g
  misc_feature (38)..(38): n is a, c, or t
  misc_feature (39)..(39): n is g or c
  misc_feature (43)..(43): n is a or c
  misc_feature (44)..(44): n is a, c, or t
  misc_feature (45)..(45): n is g or c
  misc_feature (49)..(50): n is a, c, or g
  misc_feature (51)..(51): n is g or c
  misc_feature (55)..(55): n is a, c, or g
  misc_feature (56)..(56): n is a, g, or t
  misc_feature (57)..(57): n is g or c
  misc_feature (67)..(67): n is g or c
  misc_feature (68)..(68): n is c, g, or t
  misc_feature (70)..(70): n is a or g
  misc_feature (72)..(72): n is g or c
tatttcttgagcagaacaaacnncnnnnncgganncnnnacgnnntcannncttnnnttttctcagnncngngcg

SEQ ID NO: 2215 - DNA, 48 bp, Artificial Sequence
  Description of Artificial Sequence: Synthetic polynucleotide
  misc_feature (5)..(5): n is a or c
  misc_feature (7)..(8): n is a or c
  misc_feature (10)..(10): n is a, c, or g
  misc_feature (11)..(11): n is a, c, or g
  misc_feature (12)..(12): n is g or c
  misc_feature (13)..(13): n is a or g
  misc_feature (14)..(14): n is a, c or g
  misc_feature (16)..(16): n is g or c
  misc_feature (17)..(17): n is a or g
  misc_feature (18)..(18): n is g or c
  misc_feature (31)..(31): n is a or g
  misc_feature (33)..(33): n is g or c
  misc_feature (43)..(44): n is a or c
tcaanannannnnncnnnaacaacaacagtnanttctcgtggnnagga

SEQ ID NO: 2216 - DNA, 42 bp, Artificial Sequence
  Description of Artificial Sequence: Synthetic polynucleotide
  misc_feature (4)..(4): n is g or c
  misc_feature (7)..(8): n is a or g
  misc_feature (10)..(10): n is a or g
  misc_feature (11)..(11): n is g or c
  misc_feature (13)..(13): n is a or g
  misc_feature (14)..(14): n is a, c or g
  misc_feature (15)..(15): n is g or c
  misc_feature (16)..(16): n is a or g
  misc_feature (17)..(17): n is a, c, or g
  misc_feature (19)..(19): n is a or g
  misc_feature (20)..(20): n is a, c, or g
  misc_feature (22)..(22): n is a or g
  misc_feature (25)..(25): n is a or g
  misc_feature (26)..(26): n is c or t
  misc_feature (29)..(29): n is a or c
  misc_feature (30)..(30): n is g or c
  misc_feature (31)..(31): n is a, c, t or g
  misc_feature (32)..(32): n is a, c, or t
  misc_feature (34)..(34): n is a or g
  misc_feature (35)..(35): n is a, c, or g
  misc_feature (36)..(36): n is a or c
  misc_feature (37)..(37): n is a, c or g
  misc_feature (38)..(38): n is a or g
  misc_feature (39)..(39): n is g or c
aagnaanncnncnnnnnanncnatnncgnnnncnnnnnngtc

SEQ ID NO: 2217 - DNA, 42 bp, Artificial Sequence
  Description of Artificial Sequence: Synthetic polynucleotide
  misc_feature (4)..(5): n is a, c or g
  misc_feature (5)..(5): n is g or c
  misc_feature (6)..(7): n is a, c or g
  misc_feature (8)..(8): n is g or c
  misc_feature (9)..(9): n is a or c
  misc_feature (10)..(10): n is a or g
  misc_feature (11)..(11): n is g or c
  misc_feature (12)..(12): n is g or c
  misc_feature (13)..(13): n is a or g
  misc_feature (14)..(14): n is a, c, or g
  misc_feature (16)..(16): n is a, c, or g
  misc_feature (17)..(17): n is a, c, or g
  misc_feature (18)..(18): n is g or c
  misc_feature (25)..(25): n is a, g, or t
  misc_feature (26)..(26): n is a, c, or t
  misc_feature (28)..(33): n is a, c, g, or t
  misc_feature (28)..(29): n is a, c, or g
  misc_feature (30)..(30): n is g or c
  misc_feature (31)..(31): n is a or g
  misc_feature (32)..(32): n is a, c, g, or t
  misc_feature (33)..(33): n is g or c
  misc_feature (37)..(37): n is a, c, or g
  misc_feature (38)..(38): n is a or c
  misc_feature (39)..(39): n is g or c
cagnnnnnnnnnnncnnngcagctnncnnnnnngtcnnnaca

SEQ ID NO: 2218 - DNA, 33 bp, Artificial Sequence
  Description of Artificial Sequence: Synthetic polynucleotide
  misc_feature (5)..(5): n is a or t
  misc_feature (7)..(10): n is a, c, g, or t
  misc_feature (7)..(7): n is a or g
  misc_feature (8)..(8): n is a, c or g
  misc_feature (9)..(9): n is g or c
  misc_feature (10)..(10): n is a, c or g
  misc_feature (12)..(12): n is g or c
  misc_feature (13)..(13): n is a or c
  misc_feature (14)..(14): n is a, c or g
  misc_feature (15)..(15): n is g or c
  misc_feature (16)..(16): n is a, c or g
  misc_feature (17)..(17): n is a, c, or t
  misc_feature (18)..(18): n is g or c
  misc_feature (19)..(20): n is a, g, or t
  misc_feature (25)..(25): n is g or c
  misc_feature (26)..(26): n is a or t
  misc_feature (27)..(27): n is g or c
  misc_feature (29)..(29): n is t or g
  misc_feature (30)..(30): n is g or c
aactncnnnnannnnnnnnntgtgnnntnnact

SEQ ID NO: 2219 - DNA, 30 bp, Artificial Sequence
  Description of Artificial Sequence: Synthetic polynucleotide
ttgttgaacatcaccacgtgacgcacgttc

SEQ ID NO: 2220 - DNA, 30 bp, Artificial Sequence
  Description of Artificial Sequence: Synthetic polynucleotide
tccccgtggttctactacataatgtggccg

SEQ ID NO: 2221 - DNA, 30 bp, Artificial Sequence
  Description of Artificial Sequence: Synthetic polynucleotide
ttccacactccgttttggataatgttgaac

SEQ ID NO: 2222 - DNA, 30 bp, Artificial Sequence
  Description of Artificial Sequence: Synthetic polynucleotide
agggacatccccagctccatgctgtggtcg

SEQ ID NO: 2223 - DNA, 30 bp, Artificial Sequence
  Description of Artificial Sequence: Synthetic polynucleotide
agggacaacccctccgactcgccctaatcc

SEQ ID NO: 2224 - DNA, 30 bp, Artificial Sequence
  Description of Artificial Sequence: Synthetic polynucleotide
tcctagtagaagacaccctctcactgcccg

SEQ ID NO: 2225 - DNA, 30 bp, Artificial Sequence
  Description of Artificial Sequence: Synthetic polynucleotide
agtaccatgtacacccactctcccagtgcc

SEQ ID NO: 2226 - DNA, 30 bp, Artificial Sequence
  Description of Artificial Sequence: Synthetic polynucleotide
atatggacgttcatgctgatcaccataccg

SEQ ID NO: 2227 - DNA, 30 bp, Artificial Sequence
  Description of Artificial Sequence: Synthetic polynucleotide
agcaggagctccttggcctcagcgtgcgag

SEQ ID NO: 2228 - DNA, 30 bp, Artificial Sequence
  Description of Artificial Sequence: Synthetic polynucleotide
acaagcagcttcactatgacaaccactgac

SEQ ID NO: 2229 - DNA, 284 bp, Artificial Sequence
  Description of Artificial Sequence: Synthetic polynucleotide
  misc_feature (59)..(59): n is a, c, g, or t
  misc_feature (244)..(244): n is a, c, g, or t
cagcctaggaactggcttcctggaccctgttaccgccagcagagagtctcaamammavnsrvcsrsaacaacaacagtrasttctcctggmmaggagctaccaagtaccacctcaatggcagagactctctggtgaatcccggaccagctatggcaagccacrrggacrrcrmsrrsarsttttttcctcagagcggggttctcatctttgggaagsaarrcrscrvsrvarvcratrycgmsnhcrvmvrsgtcatgattacagacgaagaggagatctggac

SEQ ID NO: 2230 - DNA, 34 bp, Artificial Sequence
  Description of Artificial Sequence: Synthetic polynucleotide
tgggacaatggcggtcgtctctcagagttktkkt

SEQ ID NO: 2231 - DNA, 35 bp, Artificial Sequence
  Description of Artificial Sequence: Synthetic polynucleotide
agaggacckktcctcgatggttcatggtggagtta

SEQ ID NO: 2232 - DNA, 31 bp, Artificial Sequence
  Description of Artificial Sequence: Synthetic polynucleotide
ccacttagggcctggtcgataccgttcggtg

SEQ ID NO: 2233 - DNA, 32 bp, Artificial Sequence
  Description of Artificial Sequence: Synthetic polynucleotide
tctcgccccaagagtagaaacccttcsttyyg

SEQ ID NO: 2234 - protein, 735 aa, Adeno-associated virus 2 [sequence omitted]

SEQ ID NO: 2235 - protein, 736 aa, Adeno-associated virus 9; identical to SEQ ID NO: 123

SEQ ID NO: 2236 - protein, 7 aa, Artificial Sequence
  Description of Artificial Sequence: Synthetic polypeptide
GSTPPPM

SEQ ID NO: 2237 - protein, 7 aa, Artificial Sequence
  Description of Artificial Sequence: Synthetic polypeptide
GETRAPL

SEQ ID NO: 2238 - protein, 6 aa, Artificial Sequence
  Description of Artificial Sequence: Synthetic polypeptide
SPAKFA

SEQ ID NO: 2239 - protein, 6 aa, Artificial Sequence
  Description of Artificial Sequence: Synthetic polypeptide
NKDKLN

SEQ ID NO: 2240 - DNA, 2306 bp, Artificial Sequence
  Description of Artificial Sequence: Synthetic polynucleotide
cctgcaggcagctgcgcgctcgctcgctcactgaggccgcccgggcaaagcccgggcgtcgggcgacctttggtcgcccggcctcagtgagcgagcgagcgcgcagagagggagtggccaactccatcactaggggttccttgtagttaatgattaacccgccatgctacttatctacgtagccatgcgtcgacataacgcgtgtttacaacatttgctgcccacttttcctaggtttcttgagacctctacaagagttggagttgacacttggggtactttcttggtgtaacgaactaatagcctgaaaaaaagaagtcatgtgttttcagcaaggcaagaaactgtctaacatagtagataaaacagagaacacttggccggaatcaactaagatgttgctatgttccattcatcatattatctccatctgcagagtagtgggttagtggagggtagaaaacattctcctgaacaactagttaaacttggctttgagttccacctgtaccacttgcataatcttgggaaagtgagttgcctaattcagtgacattaataaatttattaatttcttctttcaataaaacctggagagagcttcatatgtatcagcatatgctaaacttgaaagatacaagtagaaaatggaaggaaatatatctgactcaatagggatagttcaagggttaaattaaaagtagtaaagtattataattaatctgacatggtacctaatatataataatcatgtattaagaatgccagtcaccctctagcggccgcaattcgaacgctgacgtcatcaacccgctccaaggaatcgcgggcccagtgtcactaggcgggaacacccagcgcgcgtgcgccctggcaggaagatggctgtgagggacagggagtggcgccctgcaatatttgcatgtcgctatgtgttctgggaaatcaccataaacgtgaaatgtctttggatttgggaatcttataagttctgtatgagaccacaccggtgaagcaaagaaggggcagagggagcccgtgagctgagtgggccagggactgggagaaggagtgaggaggcagggccggcatgcctctgctgctggccagaccccttaactcatttgttcccgtctgcacctgtcactagtaacagatgagttaaggggtttggccgtgtagtgctacccagcgctggctgcctcctcagcattgcaattcctctcccatctgggcaccagtcagctaccctggtgggaatctgggtagccctcgagatagcggccgcccccgagatctttttccctctgccaaaaattatggggacatcatgaagccccttgagcatctgacttctggctaataaaggaaatttattttcattgcaatagtgtgttggaattttttgtgtctctcactcgactagatttaaatgtttgtttcttgatttgtctctccttctcagaaagtgtgcatatatctgcatggaaggtgaatgtttcagcattaaactctttgggaacgtatgtttcatcgacttccagagctgaaaagcatggtcgcctgttcaccaaggattctgtgcagcatttggtgactctgtcacttactggcgttttctcatgcaacacacataactggttcaggaccacggatagctaaagaacaggcaggagagcagaaattcaaaagaggtgaagctgaaaattttctactaaaaatacaaaaaattagccaggcatggtggcatgcacctgtagtcccagctacttgggaggctgaggcaggagaatggcttgaacctgggaggcggaggttgcagtgagccgagatggcaccactgcactccagcctggacaacaaagcgagactccgtctcaaaaaaaaaaaaaaaattatcatcctcggggccttgactgccaatatcacacatacacacacatgcatgcacacacacatgcacacaaacatgcacacacacacattacttccttctgcttatgaaagctagcattatcaatatctaaaggtaaaattttttcattattaatttattatatttttttaaagactcacatagtcttctgcacagggcattctttttgatttaaatagcatcgatgctacgtagataagtagcatggcgggttaatcattaactacagaggaacccctagtgatggagttggccactccctctctgcgcgctcgctcgctcactgaggccgggcgaccaaaggtcgcccgacgcccgggctttgcccgggcggcctcagtgagcgagcgagcgcgcagctgcctgcagg

SEQ ID NO: 2241 - DNA, 1537 bp, Artificial Sequence
  Description of Artificial Sequence: Synthetic polynucleotide
ctgcgcgctcgctcgctcactgaggccgcccgggcaaagcccgggcgtcgggcgacctttggtcgcccggcctcagtgagcgagcgagcgcgcagagagggagtgtagccatgctctaggaagatcaattcaattcacgcgtccatggcttagaaggcaagaatcctggctgtggaaagatacctaaaggatcaacagctcctggggatttggggttgctctggaaaactcatttgcaccactgctgtgccttggaatgctagttggagtaataaatctctggaacagatttggaatcacacgacctggatggagtgggacagagaaattaacaattacacaagcttaatacactccttaattgaagaatcgcaaaaccagcaagaaaagaatgaacaagaattattggaattagataaatgggcaagtttgtggaattggtttaacataacaaattggctgtggtatataaaattattcataatgatagtaggaggcttggtaggtttaagaatagtttttgctgtactttctatagtgaatagagttaggcagggatattcaccattatcgtttcagacccacctcccaaccccgaggggacccgacaggcccgaaggaatagaagaagaaggtggagagagagacagagacagatccattcgattagtgaacggatctcgacggtatcgatcacgagactagcctcgagcggccgcaattcgaacgctgacgtcatcaacccgctccaaggaatcgcgggcccagtgtcactaggcgggaacacccagcgcgcgtgcgccctggcaggaagatggctgtgagggacagggagtggcgccctgcaatatttgcatgtcgctatgtgttctgggaaatcaccataaacgtgaaatgtctttggatttgggaatcttataagttctgtatgagaccacaccggtgaagcaaagaaggggcagagggagcccgtgagctgagtgggccagggactgggagaaggagtgaggaggcagggccggcatgcctctgctgctggccagaccccttaactcatttgttcccgtctgcacctgtcactagtaacagatgagttaaggggtttggccgtgtagtgctacccagcgctggctgcctcctcagcattgcaattcctctcccatctgggcaccagtcagctaccctggtgggaatctgggtagccctcgaggacggggtgaactacgcctgaggatccgatctttttccctctgccaaaaattatggggacatcatgaagccccttgagcatctgacttctggctaataaaggaaatttattttcattgcaatagtgtgttggaattttttgtgtctctcactcggcctaggtagataagtagcatggcgggttaatcattaactacaaggaacccctagtgatggagttggccactccctctctgcgcgctcgctcgctcactgaggccgggcgaccaaaggtcgcccgacgcccgggctttgcccgggcggcctcagtgagcgagcgagcgcgcag

1-21. (canceled)

22. An adeno-associated viral (AAV) vector genome comprising a polynucleotide which comprises two inverted terminal repeats (ITRs) and a payload region; wherein the payload region comprises a molecular scaffold nucleic acid sequence which encodes:
(a) a stem and a loop which form a stem-loop structure, wherein the sequence of the stem-loop structure comprises, from 5′ to 3′:
(i) a 5′ stem arm, wherein the 5′ stem arm comprises a passenger strand sequence and a 5′ spacer sequence located 5′ to the passenger strand sequence, and wherein the passenger strand sequence encodes a sense strand which is at least 80% identical to a sequence selected from SEQ ID NO: 1085-1253;
(ii) a first loop region between 4-20 nucleotides in length, wherein the loop region comprises a nucleotide sequence which is at least 80% identical to a sequence selected from SEQ ID NO: 1264-1273; and
(iii) a 3′ stem arm, wherein the 3′ stem arm comprises a guide strand sequence and a 3′ spacer sequence located 3′ to the guide strand sequence, and wherein the guide strand sequence encodes an antisense strand which is at least 80% identical to a sequence selected from SEQ ID NO: 916-1084;
(b) a 5′ flanking region located 5′ to the passenger strand sequence, wherein the 5′ flanking region comprises the 5′ spacer sequence and a 5′ flanking sequence located 5′ to the 5′ spacer sequence, and wherein the 5′ flanking region comprises a nucleotide sequence which is at least 80% identical to a sequence selected from SEQ ID NO: 1255-1263; and
(c) a 3′ flanking region located 3′ to the guide strand sequence, wherein the 3′ flanking region comprises the 3′ spacer sequence and a 3′ flanking sequence located 3′ to the 3′ spacer sequence, and wherein the 3′ flanking region comprises a nucleotide sequence which is at least 80% identical to a sequence selected from SEQ ID NO: 1274-1280.

23. The AAV vector genome of claim 22, wherein the molecular scaffold nucleic acid sequence is at least 80% identical to a sequence selected from SEQ ID NO: 1281-1330.

24. The AAV vector genome of claim 22, wherein the antisense strand is at least 80% identical to SEQ ID NO. 963; and wherein the sense strand is at least 80% identical to SEQ ID NO. 1132.

25. The AAV vector genome of claim 24, wherein the sense strand and the antisense strand are, independently, between 20-22 nucleotides in length.

26. The AAV vector genome of claim 22, wherein the loop region comprises a nucleotide sequence which is at least 80% identical to SEQ ID NO: 1268.

27. The AAV vector genome of claim 22, wherein the 5′ flanking region comprises a nucleotide sequence which is at least 80% identical to SEQ ID NO: 1259.

28. The AAV vector genome of claim 22, wherein the 3′ flanking region comprises a nucleotide sequence which is at least 80% identical to SEQ ID NO: 1277.

29. The AAV vector genome of claim 22, wherein the polynucleotide of the AAV vector genome comprises a 5′ ITR nucleotide sequence and a 3′ ITR nucleotide sequence; wherein the 5′ ITR nucleotide sequence is at least 80% identical to a sequence selected from SEQ ID NO: 1370-1373; and wherein the 3′ ITR nucleotide sequence is at least 80% identical to a sequence selected from SEQ ID NO: 1370-1373.

30. An adeno associated virus (AAV) particle comprising the AAV vector genome of claim 22 and an AAVrh10 capsid.

31. A pharmaceutical composition comprising one or more of the AAV particles of claim 30 and one or more pharmaceutically acceptable excipients.

32. A method for inhibiting or suppressing the expression of SOD1 gene in a mammalian cell, the method comprising administering to the cell a pharmaceutical composition of claim 31.

33. The method of claim 32, wherein the expression of SOD1 is inhibited or suppressed by about 20% to about 100%.

34. A method for treating amyotrophic lateral sclerosis (ALS) in a subject, the method comprising administering to the subject a therapeutically effective amount of a pharmaceutical composition of claim 31.

35. An adeno-associated viral (AAV) vector genome comprising a polynucleotide which comprises two inverted terminal repeats (ITRs) and a payload region; wherein the payload region comprises a molecular scaffold nucleic acid sequence which encodes:
(a) a stem and a loop which form a stem-loop structure, wherein the sequence of the stem-loop structure comprises, from 5′ to 3′:
(i) a 5′ stem arm, wherein the 5′ stem arm comprises a guide strand sequence and a 5′ spacer sequence located 5′ to the guide strand sequence, and wherein the guide strand sequence encodes an antisense strand which is at least 80% identical to a sequence selected from SEQ ID NO: 916-1084;
(ii) a first loop region between 4-20 nucleotides in length, wherein the loop region comprises a nucleotide sequence which is at least 80% identical to a sequence selected from SEQ ID NO: 1264-1273; and
(iii) a 3′ stem arm, wherein the 3′ stem arm comprises a passenger strand sequence and a 3′ spacer sequence located 3′ to the passenger strand sequence, and wherein the passenger strand sequence encodes a sense strand which is at least 80% identical to a sequence selected from SEQ ID NO: 1085-1253;
(b) a 5′ flanking region located 5′ to the guide strand sequence, wherein the 5′ flanking region comprises the 5′ spacer sequence and a 5′ flanking sequence located 5′ to the 5′ spacer sequence, and wherein the 5′ flanking region comprises a nucleotide sequence which is at least 80% identical to a sequence selected from SEQ ID NO: 1255-1263; and
(c) a 3′ flanking region located 3′ to the passenger strand sequence, wherein the 3′ flanking region comprises the 3′ spacer sequence and a 3′ flanking sequence located 3′ to the 3′ spacer sequence, and wherein the 3′ flanking region comprises a nucleotide sequence which is at least 80% identical to a sequence selected from SEQ ID NO: 1274-1280.

36. The AAV vector genome of claim 35, wherein the molecular scaffold nucleic acid sequence is at least 80% identical to a sequence selected from SEQ ID NO: 1281-1330.

37. The AAV vector genome of claim 35, wherein the antisense strand is at least 80% identical to SEQ ID NO. 963; and wherein the sense strand is at least 80% identical to SEQ ID NO. 1132.

38. The AAV vector genome of claim 24, wherein the sense strand and the antisense strand are, independently, between 20-22 nucleotides in length.

39. The AAV vector genome of claim 35, wherein the loop region comprises a nucleotide sequence which is at least 80% identical to SEQ ID NO: 1268.

40. The AAV vector genome of claim 35, wherein the 5′ flanking region comprises a nucleotide sequence which is at least 80% identical to SEQ ID NO: 1259.

41. The AAV vector genome of claim 35, wherein the 3′ flanking region comprises a nucleotide sequence which is at least 80% identical to SEQ ID NO: 1277.

42. The AAV vector genome of claim 35, wherein the polynucleotide of the AAV vector genome comprises a 5′ ITR nucleotide sequence and a 3′ ITR nucleotide sequence; wherein the 5′ ITR nucleotide sequence is at least 80% identical to a sequence selected from SEQ ID NO: 1370-1373; and wherein the 3′ ITR nucleotide sequence is at least 80% identical to a sequence selected from SEQ ID NO: 1370-1373.

43. An adeno associated virus (AAV) particle comprising the AAV vector genome of claim 35 and an AAVrh10 capsid.

44. A pharmaceutical composition comprising one or more of the AAV particles of claim 43 and one or more pharmaceutically acceptable excipients.

45. A method for inhibiting or suppressing the expression of SOD1 gene in a mammalian cell, the method comprising administering to the cell a pharmaceutical composition of claim 44.

46. The method of claim 45, wherein the expression of SOD1 is inhibited or suppressed by about 20% to about 100%.

47. A method for treating amyotrophic lateral sclerosis (ALS) in a subject, the method comprising administering to the subject a therapeutically effective amount of a pharmaceutical composition of claim 44.
